(19) United States
(12) Patent Application Publication
(10) Pub. No.: US 2019/0127753 A1
(43) Pub. Date: May 2, 2019

(54) METHOD FOR MODIFYING THE RESISTANCE PROFILE OF SPINACIA OLERACEA TO DOWNY MILDEW

(71) Applicant: RIJK ZWAAN ZAADTEELT EN ZAADHANDEL B.V., De Lier (NL)

(72) Inventors: Vincent Laurens Adrianus KOCK, De Lier (NL); Johannes Geert Jan FEITSMA, De Lier (NL); Raoul Jacobus Johannes Maria FRIJTERS, De Lier (NL)

(21) Appl. No.: 15/720,797

(22) Filed: Sep. 29, 2017

(51) Int. Cl. C12N 15/82; C07K 14/415; C12Q 1/6895; A23L 19/00; A23L 33/105

(52) U.S. Cl. CPC C12N 15/8282; C07K 14/415; C12Q 1/6895; A23V 2002/00; A23L 33/105; C12Q 2600/13; A23L 19/03

(57) ABSTRACT

The present invention relates to a method for modifying the resistance profile of a spinach plant to Peronospora farinosa f. sp. spinaciae, comprising introducing a WOLF allele or a resistance-conferring part thereof into the genome of said spinach plant, or modifying an endogenous WOLF allele in the genome of said spinach plant. A WOLF allele encodes a CC-NBS-LRR protein that comprises in its amino acid sequence: the motif “MAEIGYSVC” at its N-terminus, and the motif “KWMCLR” for alpha-type WOLF proteins or “HVGCVVDR” for beta-type WOLF proteins. The invention relates to the WOLF alleles referred to in Table 3. The invention further provides a method for selecting a spinach plant comprising a novel WOLF gene that confers resistance to Peronospora farinosa f. sp. spinaciae in a spinach plant and a method for identifying a WOLF allele that confers resistance to one or more pathogenic races of Peronospora farinosa f. sp. spinaciae in a spinach plant and to primers for use in these methods.

### RELATED APPLICATIONS AND INCORPORATION BY REFERENCE

[0001] All documents cited or referenced herein (“herein cited documents”), and all documents cited or referenced in herein cited documents, together with any manufacturer's instructions, descriptions, product specifications, and product sheets for any products mentioned herein or in any document incorporated by reference herein, are hereby incorporated herein by reference, and may be employed in the practice of the invention. More specifically, all referenced documents are incorporated by reference to the same extent as if each individual document was specifically and individually indicated to be incorporated by reference.

### SEQUENCE LISTING

[0002] The instant application contains a Sequence Listing which has been submitted electronically in ASCII format and is hereby incorporated by reference in its entirety. Said ASCII copy, created on Jan. 2, 2018, is named 43104_00_2322 SL.txt and is 937,236 bytes in size.

### FIELD OF THE INVENTION

[0003] The invention relates to a method for modifying the resistance profile to Peronospora farinosa f. sp. spinaciae in a spinach plant (Spinacia oleracea). The invention also relates to plants with a modified resistance profile, to propagation material of said spinach plant, to a cell of said spinach plant, to seed of said spinach plant, and to harvested leaves of said spinach plant. This invention further relates to a method for selecting a spinach plant which may comprise an allele that confers resistance to Peronospora farinosa f. sp. spinaciae in a spinach plant. This invention also relates to a method for identifying an allele that confers resistance to one or more pathogenic races of Peronospora farinosa f. sp. spinaciae in a spinach plant, to a primer pair for amplifying at least part of such an allele from the genome of a spinach plant, and to the use of such an allele or part thereof as a marker in breeding or in producing a spinach plant that is resistant to Peronospora farinosa f. sp. spinaciae. The invention also relates to Peronospora farinosa f. sp. spinaciae resistance-conferring alleles.

### BACKGROUND OF THE INVENTION

[0004] Spinach (Spinacia oleracea) is a flowering plant from the Amaranthaceae family that is grown as a vegetable. The consumable parts of spinach are the leaves from the vegetative stage. Spinach is sold loose, bunched, in pre-packed bags, canned, or frozen. There are three basic types of spinach, namely the savoy, semi-savoy and smooth types. Savoy has dark green, crinkly and curly leaves. Flat or smooth leaf spinach has broad, smooth leaves. Semi-savoy is a variety with slightly crinkled leaves. The main market for spinach is baby-leaf. Baby spinach leaves are usually of the flat-leaf variety and usually the harvested leaves are not longer than about eight centimetres. These tender, sweet leaves are sold loose rather than in bunches. They are often used in salads, but can also be lightly cooked.

[0005] Downy mildew—in spinach caused by the oomycete fungus Peronospora farinosa f. sp. spinaciae (formerly known as Peronospora effusa)—is a major threat for spinach growers, because it affects the harvested plant parts, namely the leaves. Infection is economically devastating, as it makes the leaves unsuitable for sale and consumption, as it manifests itself phenotypically as yellow lesions on the older leaves, and on the abaxial leaf surface a greyish fungal growth can be observed. The infection can spread very rapidly, and it can occur both in glasshouse cultivation and in soil cultivation. The optimal temperature for formation and germination of Peronospora farinosa f. sp. spinaciae spores is 9 to 12° C., and it is facilitated by a high relative humidity. When spores are deposited on a humid leaf surface they can readily germinate and infect the leaf. Fungal growth is optimal between 8 and 20° C. and a relative humidity of ≥80%, and within 6 and 13 days after infection mycelium growth can be observed. Oospores of Peronospora farinosa can survive in the soil for up to 3 years, or as mycelium in seeds or living plants.

[0006] In recent years various resistance genes (so-called R-genes) have been identified that provide spinach plants with a resistance against downy mildew. However, it has been observed that previously resistant spinach cultivars can again become susceptible to the fungus. Investigations revealed that the cultivars themselves had not changed, and that the loss of downy mildew resistance must therefore be due to Peronospora farinosa overcoming the resistance in these spinach cultivars. The downy mildew races (also called physios, pathogenic races, or isolates) that were able to infect resistant spinach cultivars were collected in a differential reference set, which can be used to test spinach cultivars for resistance. The differential set comprises a series of spinach cultivars (hybrids) that have different resistance profiles to the currently identified pathogenic races.

[0007] Even though R-genes are extensively used in spinach breeding, until now not much is known of these R-genes. The R-genes present in the current commercial spinach varieties have never been characterized at the molecular level, i.e. their genomic sequence until now was unknown. Up until now there are no closely linked molecular markers known in the art that separate these R-genes, nor are the molecular characteristics of the genes themselves known in the art. Therefore, the search for new R-genes and R-gene identification is currently based on phenotypic assays in which many accessions are screened for possible variation in their resistance pattern. Subsequently it has to be determined through crossing and selection whether a newly observed resistance is in fact caused by an R-gene.

[0008] To date 16 pathogenic races of spinach downy mildew (Pfs) have been officially identified and characterized. Races 4 through 10 have been identified between 1990 and 2009 (Irish et al., 2008, Phytopathol. 98: 894-900), which illustrates the versatility and adaptability of the fungus to overcome resistances in spinach. In different geographical regions different combinations of pathogenic races occur, and the spinach industry therefore has a strong demand for spinach cultivars that are resistant to as many relevant downy mildew races as possible, preferably to all races that may occur in their region, and even to the newest threats that cannot be countered with the resistances that are present in the commercially available spinach cultivars.

[0009] In March and August 2011, the “International Working Group on Peronospora farinosa” (IWGP) designated two isolates as the type isolates for new races Pfs12 and Pfs13, respectively. As illustrated by Table 1, these newly identified Peronospora races can break the resistance of many spinach varieties that are currently used commercially worldwide, and they thus pose a serious threat to the productivity of the spinach industry. Since 2012, three new Peronospora isolates have been officially named as pathogenic races: UA4410 has been termed Pfs14 in 2012, UA4712 has been named Pfs15 in 2014, and UA1519B has become Pfs16 in 2016.

[0010] These 16 officially recognised Pfs races are all publicly available from the Department of Plant Pathology, University of Arkansas, Fayetteville, Ark. 72701, USA, and also from NAK Tuinbouw, Sotaweg 22, 2371 GD Roelofarendsveen, the Netherlands.

[0011] Spinach variety Viroflay is an example of a spinach line that is susceptible to all known Peronospora farinosa f. sp. spinaciae physios, while cultivars such as Lion and Lazio show resistance to multiple pathogenic races. However, it is crucial to stay at the forefront of developments in this field, as Peronospora continuously develops the ability to break the resistances that are present in commercial spinach varieties. For this reason new resistance genes are very valuable assets, and they form an important research focus in spinach breeding. The goal of spinach breeders is to rapidly develop spinach varieties with a resistance to as many Peronospora farinosa races as possible, including the latest identified races, before these races become wide-spread and can threaten the industry.

[0012] In the prior art no single resistance gene (R-gene) is known that confers resistance to all the known physios. In the absence of a suitable resistance to counter this pathogenic threat, especially the new isolates may spread during the next growing seasons and cause great damage to the worldwide spinach industry in the immediate future.

[0013] Citation or identification of any document in this application is not an admission that such document is available as prior art to the present invention.

### SUMMARY OF THE INVENTION

[0014] It is thus necessary to be able to stack different resistance genes against Peronospora infection in spinach in order to confer a resistance that is as broad as possible, i.e. that confers resistance to as many Pfs races as possible, preferable to all known Pfs races.

[0015] Therefore, it is an object of the invention to provide a method for modifying the resistance profile of a spinach plant to Peronospora farinosa f. sp. spinaciae, such that a spinach plant becomes resistant to various pathogenic races of Peronospora farinosa f. sp. spinaciae, including the ones that have been most recently identified, and preferably also the ones that will be identified in the future.

[0016] Another object of the invention is to provide a method for selecting a spinach plant which may comprise a gene that confers resistance to Peronospora farinosa f. sp. spinaciae with the purpose of identifying novel sources of resistance genes against various pathogenic races of Peronospora farinosa f. sp. spinaciae. Such pathogenic races include the ones that have been most recently identified, and preferably also the ones that will be identified in the future.

[0017] A further object of the invention is to provide a method for identifying a gene that confers resistance to one or more pathogenic races of Peronospora farinosa f. sp. spinaciae in a spinach plant.

[0018] In the research leading to the present invention, it was found that different resistance genes that confer resistance to Peronospora farinosa f. sp. spinaciae in spinach are not separate resistance loci, as had been previously assumed, but that they are different alleles of the same one or two genes. These one or two genes, which are either “alpha-WOLF” type or “beta-WOLF” type of genes (together referred to as “the WOLF genes”) each encode a protein that belongs to the CC-NBS-LRR family (Coiled Coil—Nucleotide Binding Site—Leucine-Rich Repeat). Depending on the allelic variant (or the allelic variants) that is (are) present in a spinach plant, said plant will produce a variant of the WOLF protein that confers a certain resistance profile to pathogenic races of Peronospora farinosa f. sp. spinaciae. The research leading to the present invention has furthermore elucidated the relationship between the different alleles present in the genome of a spinach plant and the resistance profile of said plant to a number of different pathogenic races of Peronospora farinosa f. sp. spinaciae.

[0019] In the context of this invention the term “allele” or “allelic variant” is used to designate a version of the gene that is linked to a specific phenotype, i.e. resistance profile.

[0020] It was found that a spinach plant may carry one or two WOLF genes. Each of these two WOLF genes encompasses multiple alleles, each allele conferring a particular resistance profile. The beta WOLF gene is located on scaffold 12735 (sequence: GenBank: KQ143339.1), at position 213573-221884. In case the spinach plant also carries or only carries the alpha-WOLF gene, the alpha-WOLF gene is located at approximately the same location as where the beta-WOLF gene is located on scaffld 12735 in the Viroflay genome assembly. Many different alleles were sequenced by the present inventors and their sequences are provided herein.

[0021] Based on this finding it becomes now possible to design a desired resistance profile by combining alleles with different profiles. In breeding the design of resistance profiles has been done on the basis of the phenotype, i.e. the resistances observed in spinach plants, but the invention enables combinations to be made on the basis of genotype, for example by using the sequence information provided herein for developing markers. In addition, the invention now enables tailor-made spinach plants that carry more than one or two WOLF genes by either introducing additional alleles by means of transgenesis and/or by modifying endogenous alleles to produce variants that confers desired resistance profiles.

[0022] The invention thus relates to a method for modifying the resistance profile of a spinach plant to Peronospora farinosa f. sp. spinaciae, which may comprise introducing a WOLF allele or a resistance-conferring part thereof into the genome of said spinach plant and/or modifying an endogenous WOLF allele in the genome of said spinach plant.

[0023] The invention further relates to a method for selecting a spinach plant which may comprise a novel WOLF allele that confers resistance to Peronospora farinosa f. sp. spinaciae in a spinach plant, which may comprise:

[0024] a) determining the sequence of the LRR domain or part thereof of a WOLF allele in the genome of a spinach plant;

[0025] b) comparing said sequence to the sequences in Table 3; and

[0026] c) if the sequence is substantially different from the sequences in Table 3, select the spinach plant that harbours said sequence in its genome as a spinach plant that may comprise a novel WOLF allele.

[0027] The invention according to a further aspect thereof relates to a method for identifying a WOLF allele that confers resistance to one or more pathogenic races of Peronospora farinosa f. sp. spinaciae in a spinach plant, which may comprise:

[0028] a) phenotypically selecting a spinach plant that is resistant to one or more pathogenic races of Peronospora farinosa f. sp. spinaciae;

[0029] b) determining the sequence of the LRR domain or part thereof of a WOLF allele that is present in the genome of said spinach plant, and

[0030] c) optionally comparing the sequence to a reference sequence representing the WOLF allele to be identified.

[0031] The invention also relates to a WOLF allele having a genomic or cDNA sequence listed in Table 3 and to a WOLF protein having an amino acid sequence as listed in Table 3.

[0032] The invention also relates to the use of a WOLF allele or part thereof as a marker in breeding, or in producing a spinach plant that is resistant to Peronospora farinosa f. sp. spinaciae.

[0033] Accordingly, it is an object of the invention not to encompass within the invention any previously known product, process of making the product, or method of using the product such that Applicants reserve the right and hereby disclose a disclaimer of any previously known product, process, or method. It is further noted that the invention does not intend to encompass within the scope of the invention any product, process, or making of the product or method of using the product, which does not meet the written description and enablement requirements of the USPTO (35 U.S.C. § 112, first paragraph) or the EPO (Article 83 of the EPC), such that Applicants reserve the right and hereby disclose a disclaimer of any previously described product, process of making the product, or method of using the product. It may be advantageous in the practice of the invention to be in compliance with Art. 53(c) EPC and Rule 28(b) and (c) EPC. All rights to explicitly disclaim any embodiments that are the subject of any granted patent(s) of applicant in the lineage of this application or in any other lineage or in any prior filed application of any third party is explicitly reserved Nothing herein is to be construed as a promise.

[0034] It is noted that in this disclosure and particularly in the claims and/or paragraphs, terms such as “comprises”, “comprised”, “comprising” and the like can have the meaning attributed to it in U.S. Patent law; e.g., they can mean “includes”, “included”, “including”, and the like; and that terms such as “consisting essentially of and “consists essentially of have the meaning ascribed to them in U.S. Patent law, e.g., they allow for elements not explicitly recited, but exclude elements that are found in the prior art or that affect a basic or novel characteristic of the invention.

[0035] These and other embodiments are disclosed or are obvious from and encompassed by, the following Detailed Description.

### DEPOSITS

[0036] Seeds of plants comprising the different alpha- and beta WOLF alleles of the invention were deposited with NCIMB Ltd, Ferguson Building, Craibstone Estate, Bucksburn, Aberdeen AB21 9YA, UK, on Sep. 9, 2016, under deposit accession numbers 42642-42656, except for seeds of a plant comprising the alpha-WOLF 15 allele, those were deposited with NCIMB Ltd, Ferguson Building, Craibstone Estate, Bucksburn, Aberdeen AB21 9YA, UK, on Oct. 15, 2015, under accession number NCIMB 42466. Seeds of plants comprising the alpha-WOLF alleles 16 to 20 were deposited with NCIMB Ltd, Ferguson Building, Craibstone Estate, Bucksburn, Aberdeen AB21 9YA, UK, on Sep. 28, 2017, under deposit accession numbers 42818-42822.

[0037] The Deposits with NCIMB Ltd, under deposit accession numbers 42642-42656, 42466 and 42818-42822 were made pursuant to the terms of the Budapest Treaty. Upon issuance of a patent, all restrictions upon the deposit will be removed, and the deposit is intended to meet the requirements of 37 CFR §§ 1.801-1.809. The deposit will be irrevocably and without restriction or condition released to the public upon the issuance of a patent and for the enforceable life of the patent. The deposit will be maintained in the depository for a period of 30 years, or 5 years after the last request, or for the effective life of the patent, whichever is longer, and will be replaced if necessary during that period.

### BRIEF DESCRIPTION OF THE DRAWINGS

[0038] The following detailed description, given by way of example, but not intended to limit the invention solely to the specific embodiments described, may best be understood in conjunction with the accompanying drawings.

[0039] FIG. 1: agarose gel showing PCR amplicons of alpha-type WOLF alleles, amplified from genetically different spinach plants. Each lane shows the PCR product that was obtained from a different spinach plant, using primer pairs comprising sequences SEQ ID No:1 and SEQ ID No:2. The sequence of each PCR fragment was subsequently determined using SMRT sequencing.

[0040] FIG. 2: agarose gel showing PCR amplicons from beta-type WOLF alleles, amplified from genetically different spinach plants. Each lane shows the PCR product that was obtained from a different spinach plant, using primer pairs comprising sequences SEQ ID No:3 and SEQ ID No:2. The sequence of each PCR fragment was subsequently determined using SMRT sequencing. Several of the tested plants did not harbour any beta-type WOLF genes in their genome.

### DETAILED DESCRIPTION OF THE INVENTION

[0041] The invention thus relates to a method for modifying the resistance profile of a spinach plant to Peronospora farinosa f. sp. spinaciae, which may comprise introducing a WOLF allele or a resistance-conferring part thereof into the genome of said spinach plant and/or modifying an endogenous WOLF allele in the genome of said spinach plant.

[0042] A genome assembly for spinach variety Viroflay —which is susceptible to all known pathogenic races of Peronospora farinosa f. sp. spinaciae—is publicly available (Spinacia oleracea cultivar SynViroflay, whole genome shotgun sequencing project; Bioproject: PRJNA41497; GenBank: AYZV00000000.2; BioSample: SAMN02182572, see also Dohm et al, 2014, Nature 505: 546-549). In this genome assembly for Viroflay, a beta-WOLF gene is located on scaffold12735 (sequence: GenBank: KQ143339.1), at position 213573-221884. The sequence covered by this interval comprises the entire genomic sequence of the beta-WOLF gene of Viroflay, plus 2000 basepairs sequence upstream from the gene, plus the sequence downstream from the gene, up to the locus of the neighbouring gene that is situated downstream from the WOLF gene. Importantly, however, the amino acid sequence that is encoded by the beta-WOLF gene that is present in the genome of spinach line Viroflay had been incorrectly predicted in the publicly available genome assembly. In the research leading to the present invention, RNA information has been used to correct the predicted gene model of said beta-WOLF gene, and to correctly predict the encoded amino acid sequence. The correct amino acid sequence of the beta-WOLF allele from Viroflay is represented by SEQ ID No:7. The WOLF allele of Viroflay is a so-called RO allele, which means that the allele of the beta-type WOLF gene present in the genome of Viroflay does not confer resistance to downy mildew. Allelic variants of the WOLF gene that do not confer downy mildew resistance are not part of the invention.

[0043] Spinach variety Viroflay only possesses a single WOLF gene, namely a beta-WOLF gene, but many other spinach lines harbour a single alpha-type WOLF gene at the same location in the genome. Other spinach lines harbour two or more WOLF genes at the same location in the genome. In such cases, the two or more WOLF genes are positioned adjacent to each other. In spinach lines that harbour two or more WOLF genes, said WOLF genes belong to the alpha-type and/or to the beta-type. We have observed the combination of one alpha-type WOLF gene and one beta-type WOLF gene, and of two beta-type WOLF genes. Combinations of two or more alpha-type WOLF genes are also possible.

[0044] In the research leading to the present invention, it was observed that allelic variation in the WOLF gene or genes is responsible for differences in the resistance profile of a spinach plant to pathogenic races of Peronospora farinosa f. sp. spinaciae.

[0045] The difference between an alpha-WOLF gene and a beta-WOLF gene lies in the presence of specific conserved amino acid motifs in the encoded protein sequence. As mentioned above, all WOLF proteins are NBS-LRR proteins and consequently possess—from N- to C-terminus—the following domains that are generally known in the art: a coiled coil domain (RX-CC-like, cd14798), an NBS domain (also referred to as “NB-ARC domain”, pfam00931; van der Biezen & Jones, 1998, Curr. Biol. 8: R226-R228), and leucine-rich repeats (IPR032675) which encompass the LRR domain. In addition, all WOLF proteins comprise in their amino acid sequence the motif “MAEIGYSVC” at the N-terminus. In addition to this, all alpha-WOLF proteins comprise the motif “KWMCLR” in their amino acid sequence, whereas all beta-WOLF proteins comprise the motif “HVGCVVDR” in their amino acid sequence. These motifs distinguish WOLF proteins from all other NBS-LRR proteins. All alpha-WOLF proteins and some of the beta-WOLF proteins further comprise an additional motif in their amino acid sequence, namely “(E/D)DQEDEGE”.

[0046] The resistance profile to Peronospora farinosa f. sp. spinaciae of a spinach plant is suitably determined by means of an assay, of which an example is given in Example 1. In this assay, the resistance of a spinach plant is tested against all officially recognised pathogenic races of Peronospora farinosa f. sp. spinaciae, and a standard differential set of spinach plants is used as a reference. For the plants of the differential set, the response to each of the pathogenic races has been well studied, which is illustrated by Table 1.

[0047] The present invention according to a first aspect thereof involves the introduction of a nucleic acid into a plant.

[0048] In one embodiment, introducing a WOLF allele or a resistance-conferring part thereof into the genome of a spinach plant is achieved by means of traditional breeding techniques, through crossing and selecting.

[0049] In another embodiment, introducing a WOLF allele or a resistance-conferring part thereof into the genome of a spinach plant may comprise the step of transforming a spinach cell with a nucleic acid construct which may comprise a coding sequence encoding one or more WOLF polypeptides. Suitably, the thus genetically modified spinach cell is regenerated into a spinach plant. In this embodiment, “introducing” is intended to mean providing the nucleic acid construct to the plant in such a manner that the nucleic acid construct gains access to the interior of a cell of the plant, more preferably to the nucleus of said cell, and is capable of being expressed in the cell. Such expression can be stable or transient.

[0050] In a preferred embodiment, said nucleic acid construct is designed for stable incorporation into the genome of a spinach cell. In this embodiment, said nucleic acid construct is fused into a plant transformation vector suitable for the stable incorporation of the nucleic acid construct into the genome of a plant cell. Typically, the stably transformed plant cell will be regenerated into a transformed plant that may comprise in its genome the nucleic acid construct. Such a stably transformed plant is capable of transmitting the nucleic acid construct to progeny plants in subsequent generations via sexual and/or asexual reproduction. Plant transformation vectors, methods for stably transforming plants with an introduced nucleic acid construct and methods for plant regeneration from transformed plant cells and tissues are generally known in the art. Any available plant transformation vector can be used in the context of this invention.

[0051] In one embodiment, the nucleic acid construct is stably integrated into the genome of a spinach cell at a location that is genetically linked with the endogenous WOLF locus. The endogenous WOLF gene locus is on scaffold12735, as has been described in detail above, and a location that is genetically linked with the endogenous WOLF gene locus is thus, for example, a location on the same chromosome that is close enough to make frequent meiotic recombination unlikely. This is, for example, immediately adjacent to the endogenous WOLF gene locus, or within 1 cM distance, which implies that the recombination frequency between the endogenous WOLF gene locus and the integrated nucleic acid construct is maximally one percent. It should be noted that this example is not intended to limit the invention in any way, because a genetic distance of more than 1 cM could still be useful for breeding purposes.

[0052] The situation wherein a nucleic acid construct is stably integrated into the genome of a spinach cell at a location that is genetically linked with the endogenous WOLF gene locus, makes it easier to combine said nucleic acid construct with the endogenous WOLF gene locus of the transformed spinach plant during breeding. If, for example, said nucleic acid construct confers resistance to a subset of pathogenic races of Peronospora farinosa f. sp. spinaciae, and this nucleic acid construct is integrated at a location in the genome that is genetically linked with the endogenous WOLF gene locus of a spinach plant whose endogenous WOLF allele (or WOLF alleles) confers resistance to another subset of pathogenic races of the same pathogen, then the resistance profile of the modified plant and its progeny is much broader than that of each of the original plants before modification. The nucleic acid construct and the endogenous WOLF gene locus are inherited as a single locus, which makes it easier to use the combination of both in breeding.

[0053] In an alternative embodiment, the nucleic acid construct is stably integrated into the genome of a spinach cell at a location that is not genetically linked with the endogenous WOLF gene locus. The endogenous WOLF gene locus is located on scaffold12735, as has been described in detail above, and a location that is not genetically linked therewith is thus, for example, another chromosome than the chromosome on which scaffold12735 is located, or a location on that chromosome that is distant enough from the endogenous WOLF gene locus such that meiotic recombination may frequently occur between the inserted nucleic acid construct and the endogenous WOLF gene locus. This situation makes it easier to combine said nucleic acid construct with the endogenous WOLF gene locus of other spinach plants during breeding. If, for example, said nucleic acid construct confers resistance to a subset of pathogenic races of Peronospora farinosa f. sp. spinaciae, a spinach plant harbouring said nucleic acid construct when crossed with another spinach plant whose endogenous WOLF allele (or WOLF alleles) confers resistance to another subset of pathogenic races of the same pathogen, then the resistance profile of the progeny from this cross is much broader than that of each of its original parents, if the endogenous WOLF allele (or WOLF alleles) and the nucleic acid construct that may comprise another WOLF allele are both present in its genome.

[0054] Stable transformation may be achieved using any suitable method known in the art. For spinach, specific protocols have been developed for stable transformation. For example, efficient Agrobacterium-mediated transformation protocols have been developed for spinach (Zhang and Zeevaart, 1999, Plant Cell Rep 18: 640-645; Chin et al, 2009, Plant Biotechnol 26: 243-248; Naderi et al, 2012, Adv Biosci Biotechnol 3: 876-880).

[0055] For stable integration of a WOLF allele encoding a WOLF polypeptide in a spinach plant, a nucleic acid sequence which may comprise a coding sequence encoding one or more WOLF polypeptides can be provided in an expression cassette for expression in a spinach plant. The cassette includes 5′ and 3′ regulatory sequences operably linked to the coding region of said gene, or to the genomic locus of said gene. More specifically, the nucleic acid sequence which may comprise a coding sequence encoding a WOLF polypeptide is at its 5′ end operably linked to a promoter sequence that is capable of driving gene expression in a plant cell, and more specifically in a spinach cell. At its 3′ end, it is operably linked to a suitable terminator sequence that is operational in a plant cell, and more specifically in a spinach cell.

[0056] “Operably linked” is intended to mean a functional linkage between two or more elements, for example between a polynucleotide or gene of interest and regulatory sequences, such as a promoter. Said functional linkage ensures that the polynucleotide or gene of interest is expressed in a plant cell. Operably linked elements may be contiguous or non-contiguous. When referring to the joining of two protein encoding regions, “operably linked” in intended to mean that the coding regions are in the same reading frame. The expression cassette may contain at least one additional gene to be co-transformed into the plant cell, such as a reporter gene or a selection marker (to allow for a convenient selection of transformed cells or plants, by means of treatment with, for example, a herbicide or an antibiotic). Additional genes may also be provided on multiple expression cassettes. An expression cassette typically may comprise a plurality of restriction sites and/or recombination sites for insertion of a coding sequence, such that it becomes operably linked to regulatory regions that were already present in said cassette. The expression cassette may additionally contain selectable marker genes, such as genes conferring resistance to herbicides (such as glufosinate, bromoxynil, imidazolinones, 2,4-dichlorophenoxyacetate), antibiotic resistance genes (such as neomycin phosphotransferase II, hygromycin phosphotransferase), or genes encoding fluorescent proteins such as Green Fluorescent Protein (Fetter et al, 2004, Plant Cell 16: 215-228), Yellow Fluorescent Protein (Bolte et al, 2004, J. Cell Sci. 117: 943-954), or a gene encoding beta-glucuronidase (GUS).

[0057] A typical expression cassette includes, in the 5′ to 3′ direction of transcription, a regulatory control sequence (i.e. a promoter) that ensures transcriptional and translational initiation in a plant cell, a coding region encoding one or more WOLF polypeptides according to the present invention, and a transcriptional and translational termination region that is functional in a spinach plant cell. The regulatory regions and/or the coding region may be native to the host cell (and/or derived from the same species), or they may be heterologous to the host cell (and/or derived from different species). More specifically, the regulatory regions and/or the coding region may all be derived from Spinacia oleracea, or they may be derived from a foreign plant species.

[0058] “Heterologous” is intended to mean that a sequence originates from a foreign species, or if it originates from the same species, it is substantially modified from its native form in composition and/or genomic locus, by human intervention. A chimeric gene is a gene which may comprise a coding sequence operably linked to a promoter that is heterologous to the coding sequence. The termination region may originate from the same source as the promoter, it may originate from the same source as the operably linked coding region, it may originate from the same source as the host cell, or it may have been derived from a different source as the promoter, the coding region, the host cell, or any combination thereof. Widely used termination regions are, for example, available from the Ti plasmid of Agrobacterium tumefaciens, such as the octopine synthase and nopaline synthase termination regions.

[0059] Depending on the desired outcome, a number of different promoters can be used to drive expression of the nucleic acid of the invention. It may be desirable to express the one or more WOLF alleles encoding a WOLF polypeptide constitutively in the entire plant, using a promoter sequence that confers ubiquitous expression, but it may also be desirable to limit the transgene expression to a plant part or plant parts that are most likely to be attacked or infected by Peronospora farinosa f. sp. spinaciae, such as the leaves or cotyledons, using an organ-, tissue- of cell-type-specific promoter sequence. Also, it may be desirable to make the transgene expression inducible, such that the transgene expression is elevated or induced in response to an endogenous (developmental) and/or environmental (physical or biological) queue or trigger, or regulated by chemicals.

[0060] In one embodiment, the invention thus provides a nucleic acid construct which may comprise a coding region encoding one or more WOLF polypeptides, operably linked to a constitutive promoter sequence. Constitutive promoter sequences that can confer ubiquitous gene expression throughout a plant include, but are not limited to, 35S cauliflower mosaic virus (CaMV) promoter, opine promoters, ubiquitin promoters, actin promoters, tubulin promoters, alcohol dehydrogenase promoters, fragments thereof, or combinations of any of the foregoing.

[0061] In another embodiment, the invention provides a nucleic acid construct which may comprise a coding region encoding one or more WOLF polypeptides, operably linked to a leaf-specific promoter sequence. Non-limiting examples of leaf-specific plant promoters include the Zmglp1, PnGLP and PDX1 promoters. The promoter sequence can be wild type or it can be modified for more efficient or efficacious expression.

[0062] In another embodiment, the invention provides a nucleic acid construct which may comprise a coding region encoding one or more WOLF polypeptides, operably linked to an inducible promoter sequence. Examples of suitable inducible promoter sequences for plants include, but are not limited to, promoter sequences that are regulated by heat shock, pathogens, wounding, cold, drought, heavy metals, steroids (such as dexamethasone, beta-estradiol), antibiotics, or alcohols (such as ethanol).

[0063] In a preferred embodiment, the inducible promoter is pathogen-inducible and it confers a leaf-specific expression to the nucleic acid sequence to which it is operably linked, or an epidermis-specific expression, or a mesophyll-specific expression. This approach has the advantage that the transgenic plant does not need to constitutively express the transgene, which (depending on the strength of the promoter) may require a considerable investment of the plant's energy and resources, and which may result in deleterious effects caused by the highly and ectopically expressed polypeptide.

[0064] In a more preferred embodiment, the inducible promoter is inducible by oomycete pathogen infection, and it confers a leaf-specific expression to the nucleic acid sequence to which it is operably linked. Such promoter induces gene expression in response to infection of the plant by one or more oomycete pathogen, such as Peronospora. Most preferably, said promoter induces gene expression shortly after infection of the plant by an oomycete pathogen, and in plant cells that are at or in vicinity of the oomycete pathogen. “Shortly after” is intended to mean within about 1, 2, 3, 4, 5, 6, 7, 8, 9, 10, 11, 12, 18, 24 hours after infection of the plant or plant cell with the oomycete pathogen. Examples of pathogen-inducible promoters active in leaves include, but are not limited to, the promoters of pathogenesis-related (PR) protein genes, the promoters of SAR (systemic acquired resistance) genes, the promoters of beta-1,3-glucanase genes, the promoters of chitinase genes. Suitable information can be found in, for example, EP1056862; EP0759085; Uknes et al 1992 (Plant Cell 4: 645-656); Van Loon 1985 (Plant Mol. Virol. 4: 111-116); Redolfi et al 1983 (Neth. I Plant Pathol. 89: 245-254); Marineau et al 1987 (Plant Mol. Biol. 9: 335-342); Matton et al 1987 (Mol. Plant-Microbe Interactions 2: 325-342); Somssich et al 1986 (Proc. Natl. Acad. Sci USA 83: 2427-2430); Somssich et al 1988 (Mol. Gen. Genet. 2: 93-98); Chen et al 1996 (Plant J. 10: 955-966); Zhang and Sing 1994 (Proc. Natl. Acad. Sci. USA 91: 2507-2511); Warner et al 1993 (Plant J. 3: 191-201); Siebertz et al 1989 (Plant Cell 1: 961-968).

[0065] Alternatively, the inducible promoter is inducible by wounding. Examples thereof include, for example, the promoter of the potato proteinase inhibitor (PIN II) gene (Ryan, 1990, Annu. Rev. Phytopath. 28: 425-449); the promoters of the WUN1 and WUN2 genes (U.S. Pat. No. 5,428,148); the promoters of the WIN1 and WIN2 genes (Stanford et al, 1989, Mol. Gen. Genet. 215: 200-208); the promoter of a systemin gene (McGurl et al, 1992, Science 225: 1570-1573).

[0066] In yet another embodiment, the invention provides a nucleic acid construct which may comprise a coding region encoding one or more WOLF polypeptides, operably linked to the endogenous promoter of a WOLF gene. The endogenous or native promoter is the promoter sequence that drives the expression of the WOLF gene in the spinach plant from which said gene has been isolated.

[0067] Alternatively, the endogenous promoter is the promoter sequence that drives the expression of an orthologue of said WOLF gene in the spinach plant into which the nucleic acid construct is introduced. An “orthologue” of a WOLF gene is a gene that is present in the genome of another plant, that has a high sequence similarity to other WOLF genes, and that has retained the same function. More specifically, said WOLF orthologue is present in the spinach genome at the WOLF gene locus, and it falls under the definition of a WOLF gene as described herein. The skilled person is familiar with methods for the calculation of sequence similarity. Suitably sequence similarity is calculated using EMBOSS stretcher 6.6.0, using the EBLOSUM62 matrix and the resulting “similarity score”.

[0068] Typically, the endogenous promoter sequence is located upstream of the 5′ end of the coding sequence of the gene (i.e. upstream of the start codon of the gene), in the genome of the spinach plant from which said gene has been isolated. Preferably, the endogenous promoter also may comprise any 5′UTR sequences that may be present in the endogenous gene, to ensure that the expression pattern and responsiveness (inducibility) of the transgene resembles that of the endogenous gene as closely as possible. In this case, the 3′ end of the endogenous promoter is thus situated immediately upstream from the encoded protein's ATG start codon. “Immediately upstream” is intended to mean that the promoter sequence ends one basepair upstream from said start codon, i.e. is immediately adjacent to the coding sequence. The actual length of a promoter is different for each gene, and the person skilled in the art of plant molecular biology generally knows how to select a promoter sequence for transgenic applications. Often the most important regulatory elements are located within about 500 bp upstream from the gene's ATG start codon, but important regulatory elements may also be present further upstream in the DNA. Arbitrarily, an experimenter usually defines the starting point of a gene's promoter at about 1000 bp, about 2000 bp or about 3000 bp upstream from the ATG start codon, but this choice is influenced by the location of upstream flanking genes. If the open reading frame of the gene that is adjacent to the WOLF gene of interest at the 5′ end is situated within less than about 1000 bp, or less than about 2000 bp, or less than about 3000 bp upstream from the WOLF gene's ATG start codon, then the experimenter may decide to define the intergenic sequence (i.e. the sequence that is situated between the stop codon of the 5′ flanking gene and the ATG start codon of the WOLF gene) as the promoter sequence of the WOLF gene, for use in transgenic applications.

[0069] In another embodiment, the invention relates to a method for modifying the resistance profile of a spinach plant to Peronospora farinosa f. sp. spinaciae, which may comprise modifying an endogenous WOLF allele in the genome of said spinach plant. Modifying the endogenous locus can for example be achieved by means of genome editing techniques or mutagenesis techniques.

[0070] Modification of the endogenous WOLF allele may comprise changing the endogenous allele of the WOLF gene into a WOLF allele with a known resistance profile, but it can also lead to a de novo allele conferring a novel resistance profile. Introducing a WOLF allele also encompasses introducing more than one WOLF allele. Such introduction may lead to plants with novel combinations of WOLF alleles. In case the one or more WOLF alleles are transgenically introduced into the genome of a plant it will be possible to develop plants that may comprise more than two WOLF genes and thus more than four WOLF alleles.

[0071] In one embodiment, modifying an endogenous WOLF allele may comprise the step of targeted genome editing, wherein the sequence of an endogenous WOLF allele is modified, or wherein an endogenous WOLF allele is replaced by another WOLF allele that is optionally modified. This can be achieved by means of any method known in the art for modifying DNA in the genome of a plant, or by means of methods for gene replacement. Such methods include genome editing techniques and homologous recombination.

[0072] Homologous recombination allows the targeted insertion of a nucleic acid construct into a genome, and the targeting is based on the presence of unique sequences that flank the targeted integration site. For example, the endogenous locus of a WOLF gene could be replaced by a nucleic acid construct which may comprise a different WOLF allele and/or a modified WOLF allele.

[0073] The modification of the endogenous WOLF allele can be introduced by means of mutagenesis. Mutagenesis may comprise the random introduction of at least one modification by means of one or more chemical compounds, such as ethyl methanesulphonate (EMS), nitrosomethylurea, hydroxylamine, proflavine, N-methyl-N-nitrosoguanidine, N-ethyl-N-nitrosourea, N-methyl-N-nitro-nitrosoguanidine, diethyl sulphate, ethylene imine, sodium azide, formaline, urethane, phenol and ethylene oxide, and/or by physical means, such as UV-irradiation, fast-neutron exposure, X-rays, gamma irradiation, and/or by insertion of genetic elements, such as transposons, T-DNA, retroviral elements.

[0074] Modifying an endogenous WOLF allele can involve inducing double strand breaks in DNA using zinc-finger nucleases (ZFN), TAL (transcription activator-like) effector nucleases (TALEN), Clustered Regularly Interspaced Short Palindromic Repeats/CRISPR-associated nuclease (CRISPR/Cas nuclease), or homing endonucleases that have been engineered to make double-strand breaks at specific recognition sequences in the genome of a plant, another organism, or a host cell.

[0075] TAL effector nucleases (TALENs) can be used to make double-strand breaks at specific recognition sequences in the genome of a plant for gene modification or gene replacement through homologous recombination. TAL effector nucleases are a class of sequence-specific nucleases that can be used to make double-strand breaks at specific target sequences in the genome of a plant or other organism. TAL effector nucleases are created by fusing a native or engineered transcription activator-like (TAL) effector, or functional part thereof, to the catalytic domain of an endonuclease, such as, for example, Fok I. The unique, modular TAL effector DNA binding domain allows for the design of proteins with potentially any given DNA recognition specificity. Thus, the DNA binding domains of the TAL effector nucleases can be engineered to recognise specific DNA target sites and thus, used to make double-strand breaks at desired target sequences.

[0076] ZFNs can be used to make double-strand breaks at specific recognition sequences in the genome of a plant for gene modification or gene replacement through homologous recombination. The Zinc Finger Nuclease (ZFN) is a fusion protein which may comprise the part of the Fok I restriction endonuclease protein responsible for DNA cleavage and a zinc finger protein which recognizes specific, designed genomic sequences and cleaves the double-stranded DNA at those sequences, thereby producing free DNA ends (Urnov et al, 2010, Nat. Rev. Genet. 11:636-46; Carroll, 2011, Genetics 188:773-82).

[0077] The CRISPR/Cas nuclease system can also be used to make double-strand breaks at specific recognition sequences in the genome of a plant for gene modification or gene replacement through homologous recombination. The CRISPR/Cas nuclease system is an RNA-guided DNA endonuclease system performing sequence-specific double-stranded breaks in a DNA segment homologous to the designed RNA. It is possible to design the specificity of the sequence (Jinek et al, 2012, Science 337: 816-821; Cho et al, 2013, Nat. Biotechnol. 31:230-232; Cong et al, 2013, Science 339:819-823; Mali et al., 2013, Science 339:823-826; Feng et al, 2013, Cell Res. 23:1229-1232). Cas9 is an RNA-guided endonuclease that has the capacity to create double-stranded breaks in DNA in vitro and in vivo, also in eukaryotic cells. It is part of an RNA-mediated adaptive defence system known as Clustered Regularly Interspaced Short Palindromic Repeats (CRISPR) in bacteria and archaea. Cas9 gets sequence-specificity when it associates with a guide RNA molecule, which can target sequences present in an organism's DNA based on their sequence. Cas9 requires the presence of a Protospacer Adjacent Motif (PAM) immediately following the DNA sequence that is targeted by the guide RNA. The Cas9 enzyme has been first isolated from Streptococcus pyogenes (SpCas9), but functional homologues from many other bacterial species have been reported, such as Neisseria meningitides, Treponema denticola, Streptococcus thermophilus, Francisella novicida, Staphylococcus aureus, etcetera. For SpCas9, the PAM sequence is 5′-NGG-3′, whereas various Cas9 proteins from other bacteria have been shown to recognise different PAM sequences. In nature, the guide RNA is a duplex between crRNA and tracrRNA, but a single guide RNA (sgRNA) molecule which may comprise both crRNA and tracrRNA has been shown to work equally well (Jinek et al, 2012, Science 337: 816-821). The advantage of using an sgRNA is that it reduces the complexity of the CRISPR-Cas9 system down to two components, instead of three. For use in an experimental setup (in vitro or in vivo) this is an important simplification.

[0078] An alternative for Cas9 is, for example, Cpf1, which does not need a tracrRNA to function, which recognises a different PAM sequence, and which creates sticky end cuts in the DNA, whereas Cas9 creates blunt ends.

[0079] On the one hand, genetic modification techniques can be applied to express a site-specific nuclease, such as an RNA-guided endonuclease and/or guide RNAs, in eukaryotic cells. One or more DNA constructs encoding an RNA-guided endonuclease and at least one guide RNA can be introduced into a cell or organism by means of stable transformation (wherein the DNA construct is integrated into the genome) or by means of transient expression (wherein the DNA construct is not integrated into the genome, but it expresses an RNA-guided endonuclease and at least one guide RNA in a transient manner). This approach requires the use of a transformation vector and a suitable promoter for expression in said cell or organism. Organisms into which foreign DNA has been introduced are considered to be Genetically Modified Organisms (GMOs), and the same applies to cells derived therefrom and to offspring of these organisms. In important parts of the worldwide food market, transgenic food is not allowed for human consumption, and not appreciated by the public. There is however also an alternative, “DNA-free” delivery method of CRISPR-Cas components into intact plants, that does not involve the introduction of DNA constructs into the cell or organism.

[0080] For example, introducing the mRNA encoding Cas9 into a cell or organism has been described, after in vitro transcription of said mRNA from a DNA construct encoding an RNA-guided endonuclease, together with at least one guide RNA. This approach does not require the use of a transformation vector and a suitable promoter for expression in said cell or organism.

[0081] Another known approach is the in vitro assembly of ribonucleoprotein (RNP) complexes, which may comprise an RNA-guided endonuclease protein (for example Cas9) and at least one guide RNA, and subsequently introducing the RNP complex into a cell or organism. In animals and animal cell and tissue cultures, RNP complexes have been introduced by means of, for example, injection, electroporation, nanoparticles, vesicles, and with the help of cell-penetrating peptides. In plants, the use of RNPs has been demonstrated in protoplasts, for example with polyethylene glycol (PEG) transfection (Woo et al, 2015, Nat. Biotech. 33: 1162-1164). After said modification of a genomic sequence has taken place, the protoplasts or cells can be used to produce plants that harbour said modification in their genome, using any plant regeneration method known in the art (such as in vitro tissue culture).

[0082] Breaking DNA using site specific nucleases, such as, for example, those described herein above, can increase the rate of homologous recombination in the region of the breakage. Thus, coupling of such effectors as described above with nucleases enables the generation of targeted changes in genomes which include additions, deletions and other modifications.

[0083] In one embodiment, the expression of an endogenous or native WOLF allele is eliminated in a spinach plant by the replacement of the endogenous or native WOLF allele or part thereof with a polynucleotide encoding a modified WOLF protein or part thereof, through a method involving homologous recombination as described above. In such an embodiment, the method can further comprise selfing a heterozygous plant which may comprise one copy of the new polynucleotide and one copy of the endogenous or native WOLF allele and selecting for a progeny plant that is homozygous for the new polynucleotide.

[0084] In one embodiment, the endogenous WOLF allele is thus replaced by a heterologous and/or modified WOLF allele. Suitably, replacing an endogenous WOLF allele by a heterologous and/or modified WOLF allele can be done in vitro (for example in protoplasts, cell or tissue culture) or in planta.

[0085] In a preferred embodiment, the sequence encoding the LRR domain of the WOLF protein is modified or replaced. In the research leading to the present invention, it has been found that resistance to Peronospora farinosa f. sp. spinaciae is largely determined by the sequence of the LRR domain of the WOLF protein. In particular, it seems from the current research results that the presence of an alpha-type LRR domain in the WOLF protein of a spinach plant is linked to a broader resistance profile, i.e. resistance to more pathogenic races of Peronospora farinosa f. sp. spinaciae in said spinach plant and/or an enhanced resistance profile, i.e. a profile in which the resistance to one or more races changes from intermediately resistant to resistant.

[0086] In a preferred embodiment, the sequence encoding the LRR domain of an endogenous WOLF protein is thus modified in such a manner, that it more closely resembles an alpha-type LRR domain. Alternatively, additional copies of alpha-type WOLF genes may be introduced. Table 3 shows the sequences of alpha-type LRR domains. These sequences can be used as an example of how to modify the endogenous gene.

[0087] For the purpose of this invention, the sequence encoding the LRR-domain of a WOLF protein is defined as the genomic region that can be amplified from the genome of a spinach plant by means of Polymerase Chain Reaction (PCR), using specific primer pairs. The sequence encoding an alpha-type LRR-domain (i.e. a sequence encoding the LRR-domain of an alpha-type WOLF protein) is defined as the genomic region that can be amplified using a primer pair wherein the forward primer is a nucleic acid molecule which may comprise the sequence of SEQ ID No:1 and the reverse primer is a nucleic acid molecule which may comprise the sequence of SEQ ID No:2. The sequence encoding a beta-type LRR-domain (i.e. a sequence encoding the LRR-domain of a beta-type WOLF protein) is defined as the genomic region that can be amplified using a primer pair wherein the forward primer is a nucleic acid molecule which may comprise the sequence of SEQ ID No:3 and the reverse primer is a nucleic acid molecule which may comprise the sequence of SEQ ID No:2.

[0088] PCR conditions for amplifying the LRR domain-encoding region of an alpha-WOLF gene using primers having SEQ ID No:1 and SEQ ID No:2 are, using Platinum Taq enzyme (Thermo Fisher Scientific): 3 minutes at 95° C. (initial denaturing step); 40 amplification cycles, each cycle consisting of: 30 seconds denaturation at 95° C., 30 seconds annealing at 60° C., and 30 seconds extension at 72° C.; 2 minutes at 72° C. (final extension step).

[0089] PCR conditions for amplifying the LRR domain-encoding region of a beta-WOLF gene using primers having SEQ ID No:3 and SEQ ID No:2 are as follows, using Platinum Taq enzyme (Thermo Fisher Scientific):—3 minutes at 95° C. (initial denaturing step); 40 amplification cycles, each cycle consisting of: 30 seconds denaturation at 95° C., 50 seconds annealing at 58° C. and 50 seconds extension at 72° C.; 2 minutes at 72° C. (final extension step).

[0090] This modification of an LRR-domain may be done in vitro, prior to making a construct for expression in a plant. For example, recombinant DNA technology may be used to operably fuse the sequence encoding an alpha-type LRR domain from one WOLF protein to a sequence encoding the N-terminal part of another WOLF protein, such that the expression construct encodes a chimeric protein that may comprise an N-terminal part from a first WOLF protein, fused to a C-terminal part of a second WOLF protein, wherein the C-terminal part may comprise an alpha-type LRR domain that is normally present in said second WOLF protein. The same can be done with a desirable beta-type domain.

[0091] Alternatively, said modification may be done in planta, using genome editing techniques. This is for example possible using techniques for in vivo sequence replacement such as the CRISPR-Cas system, as described above, wherein double-strand breaks are induced at the 5′ end and at the 3′ end of the sequence encoding the LRR-domain, and the endogenous sequence is replaced by an orthologous or modified sequence encoding an LRR-domain with a different sequence as the LRR-domain of the endogenous WOLF protein.

[0092] The method of the present invention leads to modification of the resistance profile of a spinach plant to Peronospora farinosa f. sp. spinaciae. “Resistance” is intended to mean that a plant does not develop the disease symptoms that are typically the outcome of the interaction between a spinach plant and the Peronospora farinosa f. sp. spinaciae pathogen, i.e. it avoids the development of yellow spots on its leaves and/or prevents the growth of the oomycete. In other words, the pathogen is prevented from causing a disease and the disease symptoms associated therewith in the plant, or the disease symptoms caused by the pathogen are minimised or lessened when compared to a control plant that is susceptible to said pathogen. “Resistance profile” is intended to mean the response of a spinach plant to different pathogenic races and isolates of Peronospora farinosa f. sp. spinaciae. Therefore, “resistance profile” refers to the combination of races of Peronospora farinosa f. sp. spinaciae to which a spinach plant shows resistance.

[0093] The resistance profile of a spinach plant may comprise scores for the interaction between said spinach plant and various pathogenic races and isolates of Peronospora farinosa f sp. spinaciae. Three scores are possible: the plant is either resistant, intermediately resistant, or susceptible to a pathogenic race or isolate, and these scores are determined based on symptoms of chlorosis and signs of pathogen sporulation on the cotyledons and true leaves, as described in Example 1. An example of the resistance profiles of several reference spinach varieties is presented in Table 1.

[0094] “Modification of the resistance profile” is intended to mean that the resistance profile of a spinach plant is changed, compared to its original resistance profile. Preferably, this change corresponds to a broadening of the resistance profile, which means that the spinach plant becomes resistant to additional pathogenic races or isolates, and/or to an enhancement of the resistance profile, which means that the spinach plant becomes more resistant to the pathogenic races or isolates that it was already partially resistant to. However, this change may also correspond to a narrowing of the resistance profile, if this would be desirable in a certain situation.

[0095] In a preferred embodiment, said modification of the resistance profile leads to a resistance of a spinach plant to all pathogenic races of Peronospora farinosa f. sp. spinaciae, or to a majority of all known pathogenic races. Suitably, said modification of the resistance profile leads to a resistance of a spinach plant to pathogenic races Pfs1 and/or Pfs2 and/or Pfs3 and/or Pfs4 and/or Pfs5 and/or Pfs6 and/or Pfs7 and/or Pfs8 and/or Pfs9 and/or Pfs10 and/or Pfs11 and/or Pfs12 and/or Pfs13 and/or Pfs14 and/or Pfs15 and/or Pfs16 of Peronospora farinosa f. sp. spinaciae, and/or to pathogenic isolate US1508 of Peronospora farinosa f. sp. spinaciae. In a preferred embodiment, modification of the resistance profile leads to resistance against, in order of increase preference two, three, four, five, six, seven, eight, nine, ten, eleven, twelve, thirteen, fourteen, fifteen or all sixteen of the races Pfs1, Pfs2, Pfs3, Pfs4, Pfs5, Pfs6, Pfs7, Pfs8, Pfs9, Pfs10, Pfs11, Pfs12, Pfs13, Pfs14, Pfs15 and Pfs16 and optionally isolate US1508.

[0096] Modification of the resistance profile of a spinach plant to Peronospora farinosa f. sp. spinaciae may be determined through comparison of a plant obtainable by the method of the invention on the one hand to a suitable control plant on the other hand, using standardised infection tests with the various pathogenic races or isolates of Peronospora farinosa f. sp. spinaciae. Positive and negative control plants can be defined for each of the pathogenic races or isolates. An officially recognised differential set is publicly available, which may comprise g a series of spinach cultivars (hybrids) that have different resistance profiles to the currently identified pathogenic races. This approach is, for example, described in Feng et al., 2014 (Plant Dis. 98: 145-152), and in Table 1 an overview in given of commonly used reference plants. The various plants of this differential set can be used as positive controls, as they have resistance to various combinations of the officially recognised pathogenic races, and their response to each pathogenic race is well-known.

[0097] The present invention also relates to a spinach plant which may comprise a WOLF allele, in particular a non-endogenous WOLF allele, obtainable by introducing a WOLF allele into the genome of the spinach plant, or by modifying an endogenous WOLF gene in the genome of the spinach plant. A spinach plant according to the invention is resistant to at least one pathogenic race or isolate of Peronospora farinosa f. sp. spinaciae. In a preferred embodiment, the invention relates to a spinach plant that has a modified resistance profile to Peronospora farinosa f. sp. spinaciae as compared to an isogenic spinach plant that has not been modified by the method of the invention. A spinach plant of the invention preferably may comprise a “non endogenous” WOLF allele, which means that it has acquired a further WOLF allele and/or has a modified endogenous WOLF allele. The acquisition of the further allele and the modification of the endogenous allele are as compared to plant before undergoing the method of the invention, i.e. the starting plant. Of course, a plant of the invention can have acquired more than one additional WOLF allele and/or have more than one modified WOLF allele.

[0098] Two plants are considered “isogenic” when they have an identical genetic composition, apart from the presence or absence of a small number of defined genes or transgenes in one of them.

[0099] A negative control plant should be genetically identical or nearly identical to the transgenic spinach plant of the invention, and it should be exposed to the same environmental conditions and pathogen(s), but should not comprise the WOLF allele in its genome and not comprise the modified endogenous WOLF allele in its genome.

[0100] For example, in embodiments of the method of the invention for producing a spinach plant that is stably transformed with a nucleic acid construct which may comprise a coding region encoding one or more WOLF polypeptides, a control plant is preferably a spinach plant that is genetically identical to said transformed plant of the invention, except that the control plant lacks the nucleic acid construct of the invention or it contains a control construct that is designed to be non-functional with respect to modifying the resistance profile to Peronospora farinosa f. sp. spinaciae. Such a control construct may, for example, lack a promoter and/or a coding region, or comprise a coding region that is unrelated to the WOLF allele of the invention. The control construct may, for example, be an “empty” vector, which lacks a nucleic acid insert in the site that is intended for foreign gene introduction. Alternatively, the control construct may for example comprise the WOLF allele of the variety Viroflay, which has been shown not to confer Peronospora farinosa f. sp. spinaciae resistance to a spinach plant. The genomic sequence of this gene corresponds to SEQ ID No:4.

[0101] As used herein, the term “transgenic” refers to a plant into whose genome nucleic acid sequences have been incorporated, including but not limited to genes, polynucleotides, DNA sequences. These genes, polynucleotides, DNA sequences may occur naturally in a species, or they may be modified versions that are altered by human intervention, for example by means of mutagenesis (random or targeted) or gene editing. In contrast, a “non-transgenic plant” is a plant that does not have foreign or exogenous nucleic acid sequences incorporated into its genome by recombinant DNA methods.

[0102] A spinach plant which may comprise an additional and/or modified WOLF allele, obtainable by the method of the present invention, may comprise any allele that encodes a CC NBS-LRR protein that may comprise in its amino acid sequence the motif “MAEIGYSVC” at its N-terminus, and the motif “KWMCLR” or “HVGCVVDR”. Suitably, the WOLF allele can be selected from the nucleotide sequences listed in Table 3, or the WOLF protein has a sequence similarity of 95%, 96%, 97%, 98%, or 99% with any one of the amino acid sequences mentioned therein.

[0103] According to the invention, the gene sequence of various alleles of WOLF genes was determined. These gene sequences were not previously disclosed and are therefore also part of the invention. The invention thus further relates to a WOLF allele which may comprise a genomic sequence selected from SEQ ID No:8, SEQ ID No:12, SEQ ID No:16, SEQ ID No:20, SEQ ID No:24, SEQ ID No:28, SEQ ID No:34, SEQ ID No:38, SEQ ID No:44, SEQ ID No:50, SEQ ID No:54, SEQ ID No:60, SEQ ID No:64, SEQ ID No:72, SEQ ID No:76, SEQ ID No:82, SEQ ID No:86, SEQ ID No:90, SEQ ID No:96, SEQ ID No:102, SEQ ID No:145, SEQ ID No:155, or which may comprise a nucleotide sequence that encodes a WOLF protein having an amino acid sequence selected from SEQ ID No:11, SEQ ID No:15, SEQ ID No:19, SEQ ID No:23, SEQ ID No:27, SEQ ID No:32, SEQ ID No:33, SEQ ID No:37, SEQ ID No:42, SEQ ID No:43, SEQ ID No:48, SEQ ID No:49, SEQ ID No:53, SEQ ID No:58, SEQ ID No:59, SEQ ID No:63, SEQ ID No:69, SEQ ID No:70, SEQ ID No:71, SEQ ID No:75, SEQ ID No:80, SEQ ID No:81, SEQ ID No:85, SEQ ID No:89, SEQ ID No:94, SEQ ID No:95, SEQ ID No:100, SEQ ID No:101, SEQ ID No:106, SEQ ID No:107, SEQ ID No:149, SEQ ID No:150, SEQ ID No:159, SEQ ID No:160 or which may comprise a nucleotide sequence that encodes a protein that has a sequence similarity of 95%, 96%, 97%, 98%, or 99% with any one of these amino acid sequences. In a specific embodiment, said WOLF allele has been isolated from the genome of a spinach plant.

[0104] The invention also relates to a vector which may comprise a WOLF allele as defined above, and to a spinach plant which may comprise said vector.

[0105] The present invention also provides progeny of a spinach plant of the invention, wherein said progeny may comprise a non-endogenous resistance-conferring WOLF allele. “Progeny” encompasses plants that are sexual descendants (in any subsequent generation) from spinach plants of the invention, and plants that result from vegetative (asexual) propagation or multiplication of spinach plants of the invention. The progeny plants have retained the WOLF alleles of the invention, and the modified resistance profile.

[0106] The invention further provides propagation material of a spinach plant of the invention, which may be used to grow or regenerate a spinach plant that may comprise a resistance-conferring WOLF allele, in particular a non-endogenous WOLF allele, i.e. an additional WOLF allele and/or a modified WOLF allele. Preferably, a spinach plant grown or regenerated from the propagation material displays the same modified resistance profile to Peronospora farinosa f. sp. spinaciae as the plant from which said propagation material has been derived. In one embodiment, the propagation material is suitable for sexual reproduction. Such propagation material may comprise for example microspores, pollen, ovaries, ovules, embryo sacs and egg cells. In another embodiment, the propagation material is suitable for vegetative reproduction. Such propagation material may comprise for example cuttings, roots, stems, cells, protoplasts, and tissue cultures of regenerable cells, parts of the plant that are suitable for preparing tissue cultures, in particular leaves, pollen, embryos, cotyledons, hypocotyls, meristematic cells, root tips, anthers, flowers, seeds and stems. The invention further relates to a spinach plant grown or regenerated from said propagation material, which plant may comprise a resistance-conferring WOLF allele and preferably has a modified resistance profile to Peronospora farinosa f. sp. spinaciae.

[0107] The invention also relates to a cell of a spinach plant of the invention, which cell may comprise a non-endogenous WOLF allele i.e. an additional WOLF allele and/or a modified WOLF allele. Preferably, the cell of the invention is part of a plant or plant part, but the cell may also be in isolated form.

[0108] The invention further relates to a seed capable of growing into a spinach plant of the invention, which seed contains in its genome a non-endogenous WOLF allele, in particular an additional WOLF allele and/or a modified WOLF allele that results in a modified resistance profile in the plant as compared to a plant not comprising the additional and/or modified WOLF allele.

[0109] The invention also relates to all commercial products that can be derived from spinach plants of the invention, such as harvested leaves of a spinach plant of the invention, a food product which may comprise the harvested leaves of a spinach plant of the invention. The invention also relates to a container which may comprise one or more spinach plants of the invention in a growth substrate for harvest of leaves from the spinach plant in a domestic environment. The downy mildew resistance is not just relevant in the growth stage of the plant to become a harvestable product but also after harvest to protect the commercial product from acquiring symptoms.

[0110] The invention also relates to a method for selecting a spinach plant which may comprise a novel WOLF allele that confers resistance to Peronospora farinosa f. sp. spinaciae in a spinach plant, which may comprise:

[0111] a) determining the sequence of at least part of a WOLF allele in the genome of a spinach plant;

[0112] b) comparing said sequence to the sequences of previously identified WOLF genes, in particular the sequences in Table 3;

[0113] c) if the sequence is substantially different from any of the sequences of previously identified WOLF genes, in particular any of the sequences in Table 3, select the spinach plant that harbours said sequence in its genome as a spinach plant that may comprise a novel WOLF gene.

[0114] In case the sequence determined in step a) is a genomic sequence comparison should be made with the genomic sequences of known alleles, in particular the alleles listed in Table 3. Likewise, when the determined sequence is a cDNA the cDNA of the known alleles should be used in the comparison.

[0115] The purpose of this method is to identify individuals that harbour in their genome a previously unknown resistance allele that, upon introduction into the genome of a spinach plant, modifies the resistance profile of said spinach plant to Peronospora farinosa f. sp. spinaciae. Preferably, said pathogenic races also include the pathogenic races that have been most recently identified, and also the pathogenic races that will be identified in the future.

[0116] In the state-of-the-art approach for resistance breeding in spinach, a collection of spinach plants is usually screened, in the hope that a source of resistance to newly identified isolates of Peronospora farinosa f. sp. spinaciae can be identified therein. This screening is performed at the level of the resistance phenotype, i.e. many different plants are inoculated with spores of the new pathogenic isolate, and the breeder checks which spinach germplasm displays a level of resistance to the new isolate. Said collection of spinach plants may comprise, for example, commercial spinach varieties, publicly available spinach breeding material, a company's private spinach breeding material, spinach gene bank material, wild spinach plants, and wild relatives of cultivated Spinacia oleracea. Wild relatives of cultivated spinach are, for example, Spinacia tetrandra and Spinacia turkestanica. If resistance to the pathogenic race is encountered in a spinach plant of the collection, this plant may be used in breeding. However, this is only possible if the resistance has a genetic basis, and if the resistant plant can be conveniently crossed to elite breeding lines of Spinacia oleracea. This phenotypic screening approach is thus very labour-intensive, and a positive outcome is not guaranteed due to a number of possible technical complications.

[0117] The method of the present invention bypasses the need for large-scale phenotypical screening, and thus it speeds up the identification and selection of potential resistance sources for existing and new isolates of Peronospora farinosa f. sp. spinaciae. In the research leading to the present invention, it was observed that all sources of resistance to known isolates of Peronospora farinosa f. sp. spinaciae are alleles (or combination of alleles) of the same locus in the spinach genome. These WOLF alleles, as defined in the current application, lie at the basis of resistance to a broad range of pathogenic races of Peronospora farinosa f. sp. spinaciae.

[0118] In a first step of this selection method, the sequence of at least part of a WOLF allele is determined in the genome of a spinach plant.

[0119] In a second step of the selection method, the sequence of at least part of a WOLF allele that has been determined in the genome of a spinach plant is compared to the sequence of other WOLF alleles. Preferably, this comparison is done at the level of the encoded amino acid sequence since nucleotide changes may not result in amino acid changes. Comparing at the protein level is thus more likely to result in identification of novel WOLF alleles with a new resistance profile.

[0120] The third step of the selection method involves selection of a spinach plant that harbours in its genome a WOLF allele sequence that is substantially different from the sequences in Table 3. Said plant can then be selected as a spinach plant that may comprise a novel WOLF allele. The three steps of this selection method will be discussed in more detail below.

[0121] Determining the sequence of at least part of a WOLF allele in the genome of a spinach plant may be performed using any suitable molecular biological method known in the art, including but not limited to (genomic) PCR amplification followed by sequencing, whole-genome-sequencing, transcriptome-sequencing, sequence-specific target capture followed by next-generation sequencing (using, for example, the xGen® target capture system of Integrated DNA Technologies), specific amplification of LRR-domain which may comprise gene sequences (using, for example, the RenSeq methodology, as described in US patent application 14/627116, and in Jupe et al., 2013, Plant J. 76: 530-544) followed by sequencing, etcetera.

[0122] Suitably, the step of specifically amplifying at least part of a WOLF allele from the genome of a spinach plant may be performed by means of PCR, using the following primer pairs, as is further illustrated in Example 2: forward primer ACAAGTGGATGTGTCTTAGG (SEQ ID No:1) and reverse primer TTCGCCCTCATCTTCCTGG (SEQ ID No:2) for the identification of alpha-type WOLF alleles, and forward primer TCACGTGGGTTGTGTTGT (SEQ ID No:3) and reverse primer TTCGCCCTCATCTTCCTGG (SEQ ID No:2) for the identification of beta-type WOLF alleles.

[0123] Determining the sequence of DNA may be performed using any suitable molecular biological method known in the art, including but not limited to Sanger sequencing of the PCR fragment (with or without a cloning step into a suitable vector), next-generation sequencing of the PCR fragment or of pools of the PCR fragments from different spinach plants (for example making use of molecular barcodes to allow the unambiguous identification of the plant from which each individual sequence has been obtained), etcetera.

[0124] As mentioned above, different primer pairs have been designed for the specific amplification of part of alpha- and beta-type WOLF alleles from a spinach genome. One PCR reaction may thus yield an amplified fragment for one or more alpha-type WOLF alleles, and another PCR reaction may yield an amplified fragment for one or more beta-type WOLF alleles. If a spinach plant harbours in its genome more than one copy of an alpha- and/or a beta-type WOLF allele, more than one amplicon will be obtained. In such a situation, direct Sanger sequencing of the PCR reaction products is not recommended, and subcloning of the PCR fragments in a suitable vector is advisable prior to sequencing of the PCR fragments. Alternatively, other approaches may be used to obtain reliable sequence information for each amplicon.

[0125] Once the DNA-sequence of at least part of the WOLF allele (or WOLF alleles) from an investigated spinach plant has been determined, said sequence is compared to the corresponding sequences of other WOLF alleles. Preferably, this comparison is done at the level of the encoded amino acid sequence. To be able to do this, the coding DNA-sequence of the WOLF allele or part thereof needs to be translated into the encoded amino acid sequence, thereby applying common sense in choosing the correct reading frame. The skilled person is capable of doing this, using freely available online bioinformatics tools.

[0126] Comparing the sequence of a WOLF allele or part thereof can be done using standard bioinformatics tools for the alignment of sequences. Typically, this involves determining the percentage identity of two sequences. To determine the percentage identity of two nucleic acid sequences or of two amino acid sequences, the sequences are aligned for optimal comparison purposes. The “percent identity” between the two sequences is a function of the number of identical positions shared by the sequences (=number of identical positions/total number of positions×100). In one embodiment, the two sequences have an identical length. The percent identity between two sequences can be determined with or without allowing gaps in the sequences. In calculating percent identity, exact matches are counted. The determination of percent identity between two sequences can be done using a mathematical algorithm. A preferred but non-limiting example of a mathematical algorithm that is used for the comparison of two sequences is the algorithm of Karlin and Altschul 1990 (Proc. Natl. Acad. Sci. USA 87: 2264), modified as described in Karlin and Altschul 1993 (Proc. Natl. Acad. Sci. USA 90: 5873-5877). Such an algorithm is incorporated into the NBLAST and XBLAST programs of Altschul et al 1990 (J. Mol. Biol. 215: 403). BLAST nucleotide searches can be performed with the NBLAST program to obtain nucleotide sequences homologous to the polynucleotides of the invention. BLAST protein searches can be performed with the XBLAST program to obtain amino acid sequences homologous to protein molecules of the invention. The default parameters can be used for this purpose.

[0127] Sequence identity or sequence similarity values provided herein refer to the value obtained using the full-length sequences of the invention (i.e. the full-length sequence of either a complete WOLF allele or WOLF protein, or of the LRR-domain-encoding part of a WOLF allele that can be amplified using the primer pairs referred to above, or of the LRR-domain encoded by said part of a WOLF allele) and using multiple alignment by means of the algorithm Clustal W (Larkin M A et al, 2007, Bioinformatics 23: 2947-2948) using default parameters, or similar analysis tools.

[0128] In this manner it can be determined whether the amino acid sequence encoded by the one or more WOLF alleles that are present in the genome of an investigated spinach plant resembles that of any of the previously identified WOLF alleles, or whether they constitute novel WOLF alleles. Given the fact that sequence variation in the WOLF gene locus lies at the basis of the resistance profile of spinach plants to pathogenic races of Peronospora farinosa f. sp. spinaciae, as has been found in the research leading to the present invention, all new alleles of a WOLF gene are potentially interesting for breeding purposes. The outcome of this query will be one of two options: either the sequence of the one or more WOLF alleles in the investigated spinach plant is identical or substantially identical to that of a previously identified WOLF allele, or it is substantially different.

[0129] When performing step a) of the selection method using the primer pairs disclosed above, the sequence encoding the LRR domain of a WOLF allele is obtained. Said primer pairs amplify the LRR domain-encoding region of a WOLF allele, and they have been designed for selectively amplifying part of a WOLF allele, and not of other CC-NBS-LRR protein-encoding alleles. In the spinach genome, these primers are thus specific for the WOLF locus. Furthermore, these primer pairs amplify a region of a WOLF allele that allows a clear discrimination between all WOLF alleles that have been identified in the research leading to the current invention. In other words, the amplified fragments can be used to determine whether the WOLF allele that is present in the investigated spinach plant is identical or substantially identical to previously identified WOLF alleles, or whether it represents a WOLF allele that is substantially different from all previously identified WOLF alleles.

[0130] When the compared sequence is identical or substantially identical to that of a previously identified WOLF allele, the resistance profile that is conferred by said WOLF allele is expected to be identical to that conferred by the previously identified WOLF allele with the same sequence. In other words: said WOLF alleles likely confer the same resistance profile onto a spinach plant, i.e. they give resistance to the same combination of pathogenic races.

[0131] “Substantially identical” is here intended to mean that the sequence of the identified WOLF allele or part thereof is nearly identical to the sequence of a previously identified WOLF allele or part thereof, apart from one or more silent mutations (i.e. mutations that do not result in an amino acid change in the encoded WOLF protein) and/or one or more conservative amino acid replacements (i.e. mutations that result in a conservative amino acid change in the encoded WOLF protein, for example the replacement of one hydrophobic, non-polar amino acid such as such as Ala, Val, Leu, Ile, Pro, Phe, Trp or Met by another hydrophobic, non-polar amino acid, or the replacement of one hydrophilic, polar amino acid such as Gly, Ser, Thr, Cys, Tyr, Asn or Gln by another hydrophilic, polar amino acid, or the replacement of one acidic, negatively charged amino acid such as Asp or Glu by another acidic, negatively charged amino acid, or the replacement of one basic, positively charged amino acid, such as Lys, Arg or His by another basic, positively charged amino acid.

[0132] “Substantially different” is here intended to mean that a WOLF allele or part thereof harbours in its encoded amino acid sequence at least one non-conservative amino acid replacement, and/or at least one insertion or deletion that changes the amino acid sequence of the encoded WOLF protein. Said insertion or deletion may, for example, cause the insertion or deletion of one or more amino acids in the encoded WOLF protein sequence, as compared to the encoded protein sequence of a previously identified WOLF allele, or it may cause a frame-shift in the encoding sequence, leading to a premature stop-codon (which leads to the expression of a truncated version of the encoded WOLF protein) and/or to a change in the encoded amino acid sequence downstream from the location of the frame shift, as compared to the encoded protein sequence of a previously identified WOLF allele.

[0133] When a spinach plant harbours in its genome a WOLF allele that encodes a WOLF protein with a sequence that is substantially different from all previously identified WOLF proteins, said spinach plant is potentially interesting for resistance breeding. The resistance profile that is conferred onto a spinach plant by a WOLF protein with a different sequence than all previously identified WOLF proteins is initially unknown, and this can subsequently be investigated. The large sequence variation at the WOLF gene locus that is present in the collection of available spinach germplasm allows a selection of spinach plants that harbour in their genome one or more WOLF alleles that may confer a novel resistance profile to pathogenic races of Peronospora farinosa f. sp. spinaciae.

[0134] An exception, however, are WOLF alleles that have a premature stop-codon and/or a frame-shift in their coding sequence, especially when this stop-codon and/or frame-shift affects the LRR-domain or the amino acid sequences at the N-terminal side of the LRR-domain. Spinach plants which may comprise such a WOLF allele are unlikely to be useful for resistance breeding, because they do not express a functional WOLF protein, unless they have another WOLF allele in their genome that is functional. Such non-functional WOLF alleles are not part of the invention.

[0135] When a novel WOLF allele is found in the genome of a hybrid plant, said plant will need to be inbred before it becomes possible to determine the functionality of said novel WOLF gene, because in a heterozygous state the presence of potentially other WOLF alleles may interfere with this functional assessment.

[0136] In this application reference is made to “previously identified WOLF alleles” to distinguish between alleles that were identified by the present inventors in prior art plants and of which the sequence at the nucleotide and/or amino acid level was already determined by them and disclosed herein, and alleles of which the sequence was not yet determined. It should be noted that the list of “previously identified WOLF alleles” is non-exhaustive, as it continues to expand while applying the identification method of the present invention. In the course of applying this screening method, different WOLF allele sequences are obtained from different germplasm, and these sequences can then be added to the list. In the research leading to the present invention, a number of representative examples of WOLF allele have thus been sequenced, and their sequences can be found in this application, and they are further illustrated in Examples 2 and 3. In one embodiment, the WOLF alleles are selected from the sequences in Table 3.

[0137] The third step of the selection method involves selection of a spinach plant that harbours in its genome a WOLF sequence that is substantially different from the sequences of previously known WOLF alleles. In one embodiment, “previously known WOLF alleles” are selected from the sequences in Table 3. Said plant can then be selected as a spinach plant that may comprise a novel WOLF allele. The selection need not necessarily be an active step. Once the comparison is made sequences that are found to be different from the known sequences are inherently selected.

[0138] When a spinach plant has been selected that harbours in its genome one or more WOLF alleles that are substantially different from all known WOLF alleles, said spinach plant may be used in breeding for modifying the resistance profile of spinach to Peronospora farinosa f. sp. spinaciae. It should then first be determined whether said spinach plant is resistant to any of the known pathogenic races or pathogenic isolates of Peronospora farinosa f. sp. spinaciae that are known to date. To determine this, a resistance assay can be performed, for example as described in Example 1. The outcome of this assay will then determine the usefulness of said spinach plant for breeding. If the selected spinach plant does not display resistance to any of the isolates or pathogenic races, it is not immediately suitable to be used in resistance breeding. Nevertheless, it can be retained as a potential source of resistance to any pathogenic isolates that may be encountered in the future, and for which a resistance in spinach would then become desirable.

[0139] If the selected spinach plant displays resistance to a subset of the tested isolates or pathogenic races, it may be interesting for immediate use in resistance breeding. It may, for example, be combined with other spinach plants that display a different (suitably a complementary) resistance profile, in order to confer upon the progeny of such a cross a broader resistance profile that is—in the ideal case—the sum of both parental resistance profiles. If the selected spinach plant displays resistance to all tested isolates or pathogenic races, or to a broad range of the tested isolates or pathogenic races, and/or to pathogenic isolates for which no source of resistance had previously been identified, then it is highly relevant for resistance breeding.

[0140] The spinach plants that are selected with the method of the present invention are maintained as a resource of potential resistance genes, on which any new pathogenic isolate of Peronospora farinosa f. sp. spinaciae that is encountered in the future can be tested. It is quite possible that WOLF alleles are present in the genome of the set of selected spinach plants, that can confer resistance to any new pathogenic variant of Peronospora farinosa f. sp. spinaciae that will evolve in the future. Such a set of spinach plants collectively harbouring in their genomes a large diversity of WOLF alleles is thus an invaluable tool for resistance breeding in spinach.

[0141] The complete sequence of a WOLF allele can be determined after its presence has been detected in a spinach plant. This may be done, for example, by means of 5′ and 3′ RACE, complete genome sequencing, sequence-specific capture followed by sequencing, etcetera. This approach may be desired, for example, when planning transgenic experiments, such as the one outlined in Example 3.

[0142] The selection method of the invention may be performed in a high-throughput setup, and it may suitably be applied to single plants, but also (either simultaneously or sequentially) to dozens, hundreds or thousands of genetically distinct spinach plants. The screened material may e.g. comprise commercial spinach varieties, publicly available spinach breeding material, a company's private spinach breeding material, spinach gene bank material, wild spinach plants, and wild relatives of cultivated Spinacia oleracea. Wild relatives of cultivated spinach are, for example, Spinacia tetrandra and Spinacia turkestanica.

[0143] The present invention also relates to a method for identifying a WOLF allele that confers resistance to one or more pathogenic races of Peronospora farinosa f. sp. spinaciae in a spinach plant, which may comprise:

[0144] a) phenotypically selecting a spinach plant that is resistant to one or more pathogenic races of Peronospora farinosa f. sp. spinaciae;

[0145] b) determining the sequence of at least part of a WOLF allele that is present in the genome of said spinach plant, and

[0146] c) optionally comparing the sequence to a reference sequence representing the WOLF allele to be identified.

[0147] In other words, said method is a method for the rapid identification of the allele that is responsible for a phenotypically observed resistance profile to pathogenic races or isolates of Peronospora farinosa f. sp. spinaciae. When a new pathogenic isolate has been identified, it is typically tested on a differential set of spinach germplasm, for example the differential set as disclosed herein, and—if no suitable source of resistance to this pathogenic isolate is present therein—also on a larger set of spinach germplasm, such as gene bank material. If one of the tested spinach plants shows resistance to the new isolate, it would be interesting to be able to quickly identify the sequence that confers said resistance. The teachings of the present disclosure enable this rapid identification of the causal allele.

[0148] Therefore, the invention also relates to newly identified alleles of the alpha- and beta-WOLF genes. In one embodiment such an allele is an allele of an alpha-WOLF gene, wherein the protein encoded by said allele is a CC-NBS-LRR protein that may comprise in its amino acid sequence: a) the motif “MAEIGYSVC” at its N-terminus; and b) the motif “KWMCLR”; and wherein the LRR domain of the protein has in order of increased preference 50%, 55%, 60%, 65%, 70%, 75%, 80%, 82%, 85%, 87%, 90%, 91%, 92%, 93%, 94%, 95%, 96%, 97%, 98%, 99%, sequence similarity to any one of the amino acid sequences having SEQ ID No:111. SEQ ID No:113, SEQ ID No:117, SEQ ID No:118, SEQ ID No:119, SEQ ID No:121, SEQ ID No:123, SEQ ID No:125, SEQ ID No:127, SEQ ID No:129, SEQ ID No:131, SEQ ID No:133, SEQ ID No:135, SEQ ID No:139, SEQ ID No:152, SEQ ID No:154, SEQ ID No:162, SEQ ID No:164, SEQ ID No:166, SEQ ID No:168, SEQ ID No:170.

[0149] The invention also relates to a spinach plant, preferably an agronomically elite spinach plant which may comprise an allele of an alpha-WOLF gene, wherein the protein encoded by said allele is a CC-NBS-LRR protein that may comprise in its amino acid sequence: a) the motif “MAEIGYSVC” at its N-terminus; and b) the motif “KWMCLR”; and wherein the LRR domain of the protein has in order of increased preference 50%, 55%, 60%, 65%, 70%, 75%, 80%, 82%, 85%, 87%, 90%, 91%, 92%, 93%, 94%, 95%, 96%, 97%, 98%, 99%, sequence similarity to any one of the amino acid sequences having SEQ ID No:111. SEQ ID No:113, SEQ ID No:117, SEQ ID No:118, SEQ ID No:119, SEQ ID No:121, SEQ ID No:123, SEQ ID No:125, SEQ ID No:127, SEQ ID No:129, SEQ ID No:131, SEQ ID No:133, SEQ ID No:135, SEQ ID No:139, SEQ ID No:152, SEQ ID No:154, SEQ ID No:162, SEQ ID No:164, SEQ ID No:166, SEQ ID No:168, SEQ ID No:170.

[0150] In another embodiment, such a newly identified allele is an allele of a beta-WOLF gene, wherein the protein encoded by said allele is a CC-NBS-LRR protein that may comprise in its amino acid sequence: a) the motif “MAEIGYSVC” at its N-terminus; and b) the motif “HVGCVVDR”; and wherein the LRR domain of the protein has in order of increased preference 50%, 55%, 60%, 65%, 70%, 75%, 80%, 82%, 85%, 87%, 90%, 91%, 92%, 93%, 94%, 95%, 96%, 97%, 98%, 99%, sequence similarity to any one of the amino acid sequences having SEQ ID No:109, SEQ ID No:115 SEQ ID No:137.

[0151] The invention also relates to a spinach plant, preferably an agronomically elite spinach plant which may comprise an allele of a beta-WOLF gene, wherein the protein encoded by said allele is a CC-NBS-LRR protein that may comprise in its amino acid sequence: a) the motif “MAEIGYSVC” at its N-terminus; and b) the motif “HVGCVVDR”; and wherein the LRR domain of the protein has in order of increased preference 50%, 55%, 60%, 65%, 70%, 75%, 80%, 82%, 85%, 87%, 90%, 91%, 92%, 93%, 94%, 95%, 96%, 97%, 98%, 99%, sequence similarity to any one of the amino acid sequences having SEQ ID No:109, SEQ ID No:115, SEQ ID No:137.

[0152] The invention further relates to a spinach plant which may comprise a WOLF allele wherein the WOLF allele encodes a CC-NBS-LRR protein that may comprise in its amino acid sequence:

[0153] the motif “MAEIGYSVC” at its N-terminus, and wherein the LRR domain of the WOLF allele has an amino acid sequence selected from the group consisting of SEQ ID No:109, SEQ ID No:111. SEQ ID No:113, SEQ ID No:115, SEQ ID No:117, SEQ ID No:118, SEQ ID No:119, SEQ ID No:121, SEQ ID No:123, SEQ ID No:125, SEQ ID No:127, SEQ ID No:129, SEQ ID No:131, SEQ ID No:133, SEQ ID No:135, SEQ ID No:137, SEQ ID No:139, SEQ ID No: 152, SEQ ID No:154, SEQ ID No:162, SEQ ID No:164, SEQ ID No:166, SEQ ID No:168, and SEQ ID No:170.

[0154] In a further embodiment the invention relates to a hybrid spinach plant which may comprise two WOLF alleles, wherein the LRR domain of the first WOLF-allele and second WOLF-allele have an amino acid sequence selected from the group consisting of SEQ ID No:109, SEQ ID No:111. SEQ ID No:113, SEQ ID No:115, SEQ ID No:117, SEQ ID No:118, SEQ ID No:119, SEQ ID No:121, SEQ ID No:123, SEQ ID No:125, SEQ ID No:127, SEQ ID No:129, SEQ ID No:131, SEQ ID No:133, SEQ ID No:135, SEQ ID No:137, SEQ ID No:139, SEQ ID No: 152, SEQ ID No:154, SEQ ID No:162, SEQ ID No:164, SEQ ID No:166, SEQ ID No:168, and SEQ ID No:170. The first and second WOLF-allele can be the same or different. The invention thus relates to any combination of two alleles wherein the LRR domain of the first WOLF-allele and second WOLF-allele have an amino acid sequence selected from the group consisting of SEQ ID No:109, SEQ ID No:111. SEQ ID No:113, SEQ ID No:115, SEQ ID No:117, SEQ ID No:118, SEQ ID No:119, SEQ ID No:121, SEQ ID No:123, SEQ ID No:125, SEQ ID No:127, SEQ ID No:129, SEQ ID No:131, SEQ ID No:133, SEQ ID No:135, SEQ ID No:137, SEQ ID No:139, SEQ ID No: 152, SEQ ID No:154, SEQ ID No:162, SEQ ID No:164, SEQ ID No:166, SEQ ID No:168, and SEQ ID No:170.

[0155] Preferably the combination of WOLF alleles is such that the resistance profile covers as many races and isolates of Peronospora farinosa f. sp. spinaciae as possible.

[0156] In a specific embodiment the hybrid spinach plant which may comprise two WOLF alleles, wherein LRR domain of the first WOLF allele has an amino acid sequence corresponding to SEQ ID No:125 and wherein the LRR domain of the second WOLF allele has an amino acid sequence corresponding to SEQ ID No:164.

[0157] In a specific embodiment the hybrid spinach plant which may comprise two WOLF alleles, wherein LRR domain of the first WOLF allele has an amino acid sequence corresponding to SEQ ID No:125 and wherein the LRR domain of the second WOLF allele has an amino acid sequence corresponding to SEQ ID No:166.

[0158] In a specific embodiment the hybrid spinach plant which may comprise two WOLF alleles, wherein LRR domain of the first WOLF allele has an amino acid sequence corresponding to SEQ ID No:127 and wherein the LRR domain of the second WOLF allele has an amino acid sequence corresponding to SEQ ID No:164.

[0159] In a specific embodiment the hybrid spinach plant which may comprise two WOLF alleles, wherein LRR domain of the first WOLF allele has an amino acid sequence corresponding to SEQ ID No:133 and wherein the LRR domain of the second WOLF allele has an amino acid sequence corresponding to SEQ ID No:152.

[0160] In a specific embodiment the hybrid spinach plant which may comprise two WOLF alleles, wherein LRR domain of the first WOLF allele has an amino acid sequence corresponding to SEQ ID No:135 and wherein the LRR domain of the second WOLF allele has an amino acid sequence corresponding to SEQ ID No:164.

[0161] In a specific embodiment the hybrid spinach plant which may comprise two WOLF alleles, wherein LRR domain of the first WOLF allele has an amino acid sequence corresponding to SEQ ID No:131 and wherein the LRR domain of the second WOLF allele has an amino acid sequence corresponding to SEQ ID No:170.

[0162] In a specific embodiment the hybrid spinach plant which may comprise two WOLF alleles, wherein LRR domain of the first WOLF allele has an amino acid sequence corresponding to SEQ ID No:133 and wherein the LRR domain of the second WOLF allele has an amino acid sequence corresponding to SEQ ID No:170.

[0163] In a specific embodiment the hybrid spinach plant which may comprise two WOLF alleles, wherein LRR domain of the first WOLF allele has an amino acid sequence corresponding to SEQ ID No:164 and wherein the LRR domain of the second WOLF allele has an amino acid sequence corresponding to SEQ ID No:170.

[0164] In a further embodiment the plant of the invention which may comprise one or more WOLF alleles is an agronomically elite spinach plant.

[0165] In the context of this invention an agronomically elite spinach plant is a non-naturally occurring plant having a genotype that results into an accumulation of distinguishable and desirable agronomic traits which is the result of human intervention, and is e.g. achieved by crossing and selection, mutagenizing, transforming or otherwise introducing such traits. An agronomically elite spinach plant includes any cultivated Spinacia oleracea plant regardless of type, such as breeding lines (e.g. backcross lines, inbred lines), cultivars and varieties (open pollinated or hybrids). Plants of Spinacia oleracea occurring in the wild (i.e. not cultivated spinach) or wild relatives of Spinacia oleracea, such as Spinacia tetrandra and Spinacia turkestanica, are not encompassed by this definition.

[0166] Preferably, the agronomically elite spinach plant which may comprise the WOLF allele is a plant of an inbred line or a hybrid.

[0167] As used herein, a plant of an inbred line is a plant of a population of plants that is the result of three or more rounds of selfing, or backcrossing; or which plant is a double haploid. An inbred line may e.g. be a parent line used for the production of a commercial hybrid.

[0168] As used herein, a hybrid plant is a plant which is the result of a cross between two different plants having different genotypes. More in particular, a hybrid plant is the result of a cross between plants of two different inbred lines, such a hybrid plant may e.g. be a plant of an F1 hybrid variety.

[0169] In one embodiment, the invention relates to a method for identifying a WOLF allele that confers resistance to one or more pathogenic races of Peronospora farinosa f. sp. spinaciae in a spinach plant, wherein part of a WOLF allele is amplified from the plant's genome by means of PCR. Preferably, said part of a WOLF allele is the region encoding the LRR-domain of the encoded WOLF protein. The LRR-domain-encoding region can suitably be amplified by means of PCR, using a primer pair, wherein the forward primer is a nucleic acid molecule which may comprise the sequence of SEQ ID No:1 or SEQ ID No:3, and the reverse primer is a nucleic acid molecule which may comprise the sequence of SEQ ID No:2.

[0170] The invention also relates to a primer pair for amplifying part of a WOLF allele from the genome of a spinach plant, wherein the forward primer is a nucleic acid molecule which may comprise the sequence of SEQ ID No:1 or SEQ ID No:3, and the reverse primer is a nucleic acid molecule which may comprise the sequence of SEQ ID No:2. The use of said primer pair is illustrated in Example 2 and is also part of this invention.

[0171] The invention also relates to the use of a WOLF allele or part thereof as a marker in breeding or in producing a spinach plant that is resistant to Peronospora farinosa f. sp. spinaciae.

[0172] The teachings of the present disclosure greatly facilitate resistance breeding in spinach, because they identify genetic variation in the alpha and beta WOLF genes as the major source of enhanced resistance against Peronospora farinosa f. sp. spinaciae.

[0173] A gene is a section of DNA that controls a certain trait. An allele is one of a number of alternative forms of the same gene or same genetic locus. Different alleles may result in different observable phenotypic traits. Chromosomes occur in pairs so organisms have two alleles for each gene—one allele in each chromosome in the pair. This invention relates to two types of WOLF genes, alpha-type WOLF genes and beta-type WOLF genes. There are a number of alternative forms of the alpha-type WOLF genes and a number of alternative forms of the beta-type WOLF genes. Alpha-type WOLF alleles are variants of an alpha-type WOLF gene and beta-type WOLF alleles are variants of a beta-type WOLF gene. A plant that has two WOLF genes will have four WOLF alleles. A plant that has three WOLF genes has six WOLF alleles, etc. Within a gene, the alleles may be the same or different but are preferably different because that way two resistance profiles can be combined. As used in this application the term “allele” is thus used for one form of a WOLF gene. However, sometimes the word “gene” may be used where actually an allele is intended. It will be clear to the skilled person when that is the case.

[0174] Table 1 shows the differential set of spinach downy mildew races and the resistance of various spinach varieties (hybrids) to each one of these pathogenic races. A susceptible reaction is scored as “+” (indicating a successful infection by the fungus), and resistance is depicted as “−” (absence of sporulation on the cotyledons). A weak resistance response is indicated as “(−)”, which in practice means a slightly reduced level of infection (with only symptoms of chlorosis, or sporulation only occurring on the tips of the cotyledons in the differential seedling test).

| | plants | | | | | | | | | | | |
|---|---|---|---|---|---|---|---|---|---|---|---|---|
| Races | Viroflay | Resistoflay | Califlay | Clermont | Campania | Boeing | Lion | Lazio | Whale | Polka | Pigeon | Meerkat |
| Pfs: 1 | + | − | − | − | − | − | − | − | − | − | − | − |
| Pfs: 2 | + | − | + | − | − | − | − | − | − | − | − | − |
| Pfs: 3 | + | + | − | − | − | − | − | − | − | − | − | − |
| Pfs: 4 | + | + | + | − | − | − | − | − | (−) | + | − | − |
| Pfs: 5 | + | + | − | + | − | − | − | − | − | − | − | − |
| Pfs: 6 | + | + | + | + | + | − | − | − | (−) | + | − | − |
| Pfs: 7 | + | + | + | + | − | − | − | − | (−) | + | − | − |
| Pfs: 8 | + | + | − | + | + | + | − | − | − | − | − | − |
| Pfs: 9 | + | + | − | + | + | − | − | − | − | − | − | − |
| Pfs: 10 | + | + | + | + | + | + | + | − | + | + | − | − |
| Pfs: 11 | + | + | − | + | − | − | − | + | − | − | − | − |
| Pfs: 12 | + | + | − | + | + | + | − | + | − | − | − | − |
| Pfs: 13 | + | + | + | + | (−) | − | − | + | + | (−) | − | − |
| Pfs: 14 | + | + | − | + | + | + | − | + | (−) | − | + | − |
| Pfs: 15 | + | + | + | − | − | − | − | − | + | + | − | − |
| US1508 | + | + | − | − | − | − | − | − | − | − | + | + |
| Pfs: 16 | + | + | − | + | − | − | − | + | − | − | + | + |

TABLE 2
WOLF alleles identified and selected using the selection method
of the invention

| | | LRR DNA | LRR protein |
|---|---|---|---|
| Allele name | NCIMB deposit | SEQ ID No; | SEQ ID No: |
| Beta WOLF 0 | NCIMB 42643 | 108 | 109 |
| Alpha WOLF 2 | NCIMB 42652 | 110 | 111 |
| Alpha WOLF 2a | NCIMB 42642 | 112 | 113 |
| Beta WOLF 3 | NCIMB 42652 | 114 | 115 |
| Alpha WOLF 4 | NCIMB 42655 | 116 | 117 |
| Alpha WOLF 4a | NCIMB 42645 | 118 | 119 |
| Alpha WOLF 6 | NCIMB 42654 | 120 | 121 |
| Alpha WOLF 6b | NCIMB 42648 | 122 | 123 |
| Alpha WOLF 7 | NCIMB 42653 | 124 | 125 |
| Alpha WOLF 8 | NCIMB 42646 | 126 | 127 |
| Alpha WOLF 9 | NCIMB 42656 | 132 | 133 |
| Alpha WOLF 10 | NCIMB 42656 | 128 | 129 |
| Alpha WOLF 11 | NCIMB 42647 | 134 | 135 |
| Beta WOLF 11 | NCIMB 42647 | 136 | 137 |
| Alpha WOLF 12 | NCIMB 42650 | 138 | 139 |
| Alpha WOLF 15 | NCIMB 42466 | 130 | 131 |
| Alpha WOLF 16 | NCIMB 42820 | 151 | 152 |

[0175] Table 3. Introduction of one or more WOLF alleles results in a modification of the resistance profile of susceptible spinach variety Viroflay.

[0176] A “−” means complete resistance against a particular downy mildew race; “(−)” means intermediate resistance against a particular downy mildew race; “+” means that the allele confers no resistance and would cause a plant only carrying that particular allele to be susceptible for that particular downy mildew race. When an intermediate resistance response against a particular downy mildew race is only observed in the homozygous state of a particular allele this is indicated as “(−)*”. In case a resistance against a particular downy mildew race is only observed in the homozygous state of a particular allele, and the resistance for that allele in heterozygous state to that particular downy mildew race is intermediate this is indicated as “−**”

TABLE 3

| | | Genomic | Promoter | cDNA | Protein | | | | |
|---|---|---|---|---|---|---|---|---|---|
| Allele | Deposit | SEQ | SEQ | SEQ | SEQ | Pfs: | Resistance profile conferred by the constructs | | |
| name | number | ID No: | ID No: | ID No: | ID No: | 1 | 2 | 3 | 4 |
| Beta | NCIMB | 4 | 5 | 6 | 7 | + | + | + | + |
| WOLF 0 | 42643 | | | | | | | | |
| Alpha | NCIMB | 8 | 9 | 10 | 11 | − | − | + | + |
| WOLF 2 | 42652 | | | | | | | | |
| Alpha | NCIMB | 12 | 13 | 14 | 15 | + | − | + | + |
| WOLF 2a | 42642 | | | | | | | | |
| Beta | NCIMB | 16 | 17 | 18 | 19 | − | + | − | + |
| WOLF 3 | 42652 | | | | | | | | |
| Alpha | NCIMB | 20 | 21 | 22 | 23 | − | − | − | − |
| WOLF 4 | 42655 | | | | | | | | |
| Alpha | NCIMB | 24 | 25 | 26 | 27 | − | − | (−) | − |
| WOLF 4a | 42645 | | | | | | | | |
| Beta | NCIMB | 28 | 29 | 30, 31 | 32, 33 | − | + | − | + |
| WOLF 5a | 42649 | | | | | | | | |
| Beta | | 34 | 35 | 36 | 37 | | | | |
| WOLF 5b | | | | | | | | | |
| Alpha | NCIMB | 38 | 39 | 40, 41 | 42, 43 | − | − | − | − |
| WOLF 6 | 42654 | | | | | | | | |
| Alpha | NCIMB | 44 | 45 | 46, 47 | 48, 49 | − | − | − | − |
| WOLF 6b | 42648 | | | | | | | | |
| Beta | | 50 | 51 | 52 | 53 | | | | |
| WOLF 6b | | | | | | | | | |
| Alpha | NCIMB | 54 | 55 | 56, 57 | 58, 59 | − | − | − | − |
| WOLF 6c | 42644 | | | | | | | | |
| Alpha | NCIMB | 60 | 61 | 62 | 63 | − | − | − | − |
| WOLF 7 | 42653 | | | | | | | | |
| Alpha | NCIMB | 64 | 65 | 66, 67, 68 | 69, 70, 71 | − | − | + | + |
| WOLF 8 | 42646 | | | | | | | | |
| Alpha | NCIMB | 72 | 73 | 74 | 75 | − | − | − | − |
| WOLF 10 | 42656 | | | | | | | | |
| Alpha | NCIMB | 76 | 77 | 78, 79 | 80, 81 | − | − | − | − |
| WOLF 15 | 42466 | | | | | | | | |
| Alpha | NCIMB | 82 | 83 | 84 | 85 | − | − | − | − |
| WOLF 9 | 42656 | | | | | | | | |
| Beta | | 86 | 87 | 88 | 89 | | | | |
| WOLF 9 | | | | | | | | | |
| Alpha | NCIMB | 90 | 91 | 92, 93 | 94, 95 | − | + | − | − |
| WOLF 11 | 42647 | | | | | | | | |
| Beta | | 96 | 97 | 98, 99 | 100, 101 | | | | |
| WOLF 11 | | | | | | | | | |
| Alpha | NCIMB | 102 | 103 | 104, 105 | 106, 107 | − | − | − | − |
| WOLF 12 | 42650 | | | | | | | | |
| Alpha | NCIMB | 145 | 146 | 147, 148 | 149, 150 | − | − | − | − |
| WOLF16 | 42820 | | | | | | | | |
| Alpha | NCIMB | | | | | nt | − | nt | − |
| WOLF17 | 42818 | | | | | | | | |
| Alpha | NCIMB | 155 | 156 | 157, 158 | 159, 160 | nt | nt | nt | nt |
| WOLF18 | 42819 | | | | | | | | |
| Alpha | NCIMB | | | | | − | − | − | (−)* |
| WOLF19 | 42822 | | | | | | | | |
| Alpha | NCIMB | | | | | − | − | − | − |
| WOLF20 | 42821 | | | | | | | | |
| Alpha | | | | | | −** | (−)* | −** | −** |
| WOLF21 | | | | | | | | | |
| Alpha | | | | | | − | − | + | + |
| WOLF22 | | | | | | | | | |

| Allele | Resistance profile conferred by the constructs | | | | | | | | | | | | |
|---|---|---|---|---|---|---|---|---|---|---|---|---|---|
| name | 5 | 6 | 7 | 8 | 9 | 10 | 11 | 12 | 13 | 14 | 15 | 16 | US1508 |
| Beta | + | + | + | + | + | + | + | + | + | + | + | + | + |
| WOLF 0 | | | | | | | | | | | | | |
| Alpha | + | (−) | + | + | + | + | + | + | + | + | + | + | + |
| WOLF 2 | | | | | | | | | | | | | |
| Alpha | + | + | + | + | + | + | + | + | + | + | − | + | + |
| WOLF 2a | | | | | | | | | | | | | |
| Beta | − | + | + | (−) | − | + | − | − | + | − | + | − | − |
| WOLF 3 | | | | | | | | | | | | | |
| Alpha | + | + | + | + | + | + | + | + | + | + | − | + | − |
| WOLF 4 | | | | | | | | | | | | | |
| Alpha | + | + | + | + | + | + | + | + | + | + | − | + | nt |
| WOLF 4a | | | | | | | | | | | | | |
| Beta | − | + | + | + | + | + | + | + | + | + | + | + | + |
| WOLF 5a | | | | | | | | | | | | | |
| Beta | | | | | | | | | | | | | |
| WOLF 5b | | | | | | | | | | | | | |
| Alpha | − | − | + | + | − | + | − | − | − | − | − | + | + |
| WOLF 6 | | | | | | | | | | | | | |
| Alpha | − | − | + | + | − | + | − | − | − | − | − | + | − |
| WOLF 6b | | | | | | | | | | | | | |
| Beta | | | | | | | | | | | | | |
| WOLF 6b | | | | | | | | | | | | | |
| Alpha | − | − | + | + | − | + | − | − | − | − | − | + | − |
| WOLF 6c | | | | | | | | | | | | | |
| Alpha | − | − | − | + | − | + | − | + | − | + | − | − | − |
| WOLF 7 | | | | | | | | | | | | | |
| Alpha | (−)* | − | + | − | + | (−)* | + | + | + | + | − | (−) | nt |
| WOLF 8 | | | | | | | | | | | | | |
| Alpha | − | − | − | − | − | − | + | + | + | + | − | + | + |
| WOLF 10 | | | | | | | | | | | | | |
| Alpha | − | − | + | −** | − | (−) | − | − | − | − | − | + | − |
| WOLF 15 | | | | | | | | | | | | | |
| Alpha | − | − | − | − | − | − | − | − | − | + | + | + | + |
| WOLF 9 | | | | | | | | | | | | | |
| Beta | | | | | | | | | | | | | |
| WOLF 9 | | | | | | | | | | | | | |
| Alpha | − | (−)* | − | + | + | + | − | + | − | + | − | − | − |
| WOLF 11 | | | | | | | | | | | | | |
| Beta | | | | | | | | | | | | | |
| WOLF 11 | | | | | | | | | | | | | |
| Alpha | + | − | − | − | − | − | − | − | − | + | + | + | + |
| WOLF 12 | | | | | | | | | | | | | |
| Alpha | − | nt | + | nt | nt | nt | − | − | − | − | − | + | − |
| WOLF16 | | | | | | | | | | | | | |
| Alpha | nt | nt | + | nt | nt | nt | − | − | − | − | − | + | nt |
| WOLF17 | | | | | | | | | | | | | |
| Alpha | nt | nt | nt | nt | nt | − | nt | nt | − | − | − | + | nt |
| WOLF18 | | | | | | | | | | | | | |
| Alpha | − | − | − | − | − | − | − | − | − | − | − | + | nt |
| WOLF19 | | | | | | | | | | | | | |
| Alpha | + | − | − | − | − | − | − | − | nt | + | + | + | nt |
| WOLF20 | | | | | | | | | | | | | |
| Alpha | − | − | (−) | −** | − | −** | + | + | + | + | − | + | nt |
| WOLF21 | | | | | | | | | | | | | |
| Alpha | nt | − | + | − | + | + | + | + | + | + | − | nt | nt |
| WOLF22 | | | | | | | | | | | | | |

[0177] Although the present invention and its advantages have been described in detail, it should be understood that various changes, substitutions and alterations can be made herein without departing from the spirit and scope of the invention as defined in the appended claims.

[0178] The present invention will be further illustrated in the following Examples which are given for illustration purposes only and are not intended to limit the invention in any way.

### EXAMPLES

### Example 1

### Testing for Resistance to Peronospora farinosa f. sp. spinaciae in Spinach Plants

[0179] The resistance to downy mildew infection was assayed as described by Irish et al. (2008; Phytopathol. 98: 894-900), using a differential set. Spinach plants of the invention were sown along with spinach plants from different other genotypes (see Table 1) in trays containing Scotts Redi-Earth medium, and fertilized twice a week after seedling emergence with Osmocote Peter's (13-13-13) fertilizer (Scotts). Plants were inoculated with a sporangial suspension (2.5×10⁵/ml) of a pathogenic race of Peronospora farinosa f. sp. spinaciae at the first true leaf stage. In this manner, 16 officially recognized pathogenic races were tested, as well as pathogenic isolate US1508 (as shown in Table 1). Peronospora farinosa f. sp. spinaciae isolate US1508 has been reported to the NAK Tuinbouw, Sotaweg 22, 2371 GD Roelofarendsveen as a candidate for official denomination as a new Peronospora farinosa f. sp. spinaciae race. Along with the 16 officially recognised Peronospora races, this isolate is available from Rijk Zwaan, Burgemeester Crezéelaan 40, 2678 KX De Lier.

[0180] The inoculated plants were placed in a dew chamber at 18° C. with 100% relative humidity for a 24 h period, and then moved to a growth chamber at 18° C. with a 12 h photoperiod for 6 days. After 6 days, the plants were returned to the dew chamber for 24 h to induce sporulation, and they were scored for disease reaction.

[0181] Plants for this specific test were scored as resistant, intermediately resistant, or susceptible based on symptoms of chlorosis and signs of pathogen sporulation on the cotyledons and true leaves, as described by Irish et al. (2007; Plant Dis. 91: 1392-1396). Plants exhibiting no evidence of chlorosis and sporulation were in this specific test considered as resistant. Resistant plants were re-inoculated to assess whether plants initially scored as resistant had escaped infection, or whether they were truly resistant. Plants that showed only symptoms of chlorosis, or sporulation occurring only on the tips of the cotyledons were scored as intermediately resistant. Plants showing more than these symptoms of downy mildew infection were scored as being susceptible.

[0182] Table 1 shows the differential set of spinach downy mildew races and the resistance of various spinach varieties (hybrids) to each one of these pathogenic races.

### Example 2

### Identification of WOLF Alleles That Confer Resistance to Peronospora farinosa f. sp. spinaciae in Spinach

[0183] A large number of genetically different spinach plants was phenotypically tested for resistance to various pathogenic races and isolates of Peronospora farinosa f. sp. spinaciae, using the assay described in Example 1. Genomic DNA was subsequently isolated from plants that showed resistance to one or more pathogenic races or isolates. The goal of this experiment was to identify one or more WOLF alleles that are responsible for the resistance in those spinach plants. Table 2 gives an overview of the plants that were used in this experiment.

[0184] The isolated genomic DNA was used in polymerase chain reactions (PCR), using forward primer ACAAGTGGATGTGTCTTAGG (SEQ ID No:1)and reverse primer TTCGCCCTCATCTTCCTGG (SEQ ID No:2) for the identification of alpha-type WOLF alleles, and forward primer TCACGTGGGTTGTGTTGT (SEQ ID No:3) and reverse primer TTCGCCCTCATCTTCCTGG (SEQ ID No:2) for the identification of beta-type WOLF alleles. Said primer pairs amplify the LRR domain-encoding region of a WOLF allele, and they have been designed for selectively amplifying a part of a WOLF gene, and not of other CC-NBS-LRR protein-encoding genes.

[0185] If PCR products were subsequently to be Sanger sequenced, PCR conditions were as follows, using Platinum Taq enzyme (Thermo Fisher Scientific):

[0186] Primer pair with SEQ ID No:1 and SEQ ID No:2:
[0187] 3 minutes at 95° C. (initial denaturing step)
[0188] 40 amplification cycles, each cycle consisting of: 30 seconds denaturation at 95° C., 30 seconds annealing at 60° C., and 30 seconds extension at 72° C.
[0189] 2 minutes at 72° C. (final extension step)

[0190] Primer pair SEQ ID No:3 and SEQ ID No:2:
[0191] 3 minutes at 95° C. (initial denaturing step)
[0192] 40 amplification cycles, each cycle consisting of: 30 seconds denaturation at 95° C., 50 seconds annealing at 58° C. and 50 seconds extension at 72° C.
[0193] 2 minutes at 72° C. (final extension step)

[0194] Sanger sequencing, however, is only possible when a plant harbours in its genome a single alpha-type WOLF allele and/or a single beta-type WOLF allele, because the presence of multiple PCR-amplicons in the sequencing reaction would frustrate adequate Sanger sequencing, and the resulting sequence would be an average of all different fragments that are present in the mixture. In case a spinach plant is suspected to harbor multiple alpha- and/or beta-WOLF alleles in its genome, said plant can be inbred by means of selfing, and among the progeny individuals can be identified that are homozygous for a the alpha- and/or beta-WOLF alleles. Alternatively, if said plant harbours in its genome only alpha-type WOLF alleles and no beta-type WOLF alleles, it can be crossed to susceptible spinach variety Viroflay, which harbours in its genome a single beta-type WOLF gene. In the progeny of this cross it will then be possible to specifically PCR-amplify an alpha-type WOLF allele, because Viroflay only has an endogenous beta-type WOLF allele, and no alpha-type WOLF alleles. When a plant harbours in its genome more than one alpha-type and/or beta-type WOLF allele, next-generation sequencing is a good alternative. For example, SMRT sequencing (Pacific Biosciences) can be used to simultaneously identify multiple alpha-type WOLF genes in a genome, or multiple beta-type WOLF alleles.

[0195] If PCR products were to be sequenced using SMRT sequencing (Pacific Biosciences), PCR primers and PCR conditions were different. To the above-mentioned forward primers the following standard amplification sequence was added: GCAGTCGAACATGTAGCTGACTCAGGTCAC (SEQ ID No: 140). To the reverse primer, the following standard amplification sequence was added: TGGATCACTTGTGCAAGCATCACATCGTAG (SEQ ID No:141). The three primers used for PCR prior to SMRT sequencing thus comprised in their sequence SEQ ID No:1, SEQ ID No:2 and SEQ ID No:3, respectively.

[0196] For the identification of alpha-type WOLF genes with primers GCAGTCGAACATGTAGCTGACTCAGGTCACACAAGTGGATGTGTCTTAGG (SEQ ID No:142) and TGGATCACTTGTGCAAGCATCACATCGTAGTTCGCCCTCATCTTCCTGG (SEQ ID No:143), PCR conditions were as follows, using KAPA HiFi Hotstart polymerase (Kapa Biosystems):
[0197] 3 minutes at 98° C. (initial denaturing step)
[0198] 35 amplification cycles, each cycle consisting of: 30 seconds denaturation at 98° C., 20 seconds annealing at 58° C., and 60 seconds extension at 72° C.
[0199] 3 minutes at 72° C. (final extension step)

[0200] For the identification of beta-type WOLF genes with primers GCAGTCGAACATGTAGCTGACTCAGGTCACTCACGTGGGTTGTGTTGT (SEQ ID No:144) and TGGATCACTTGTGCAAGCATCACATCGTAGTTCGCCCTCATCTTCCTGG (SEQ ID No:143), PCR conditions were as follows, using KAPA HiFi Hotstart polymerase (Kapa Biosystems):
[0201] 3 minutes at 98° C. (initial denaturing step)
[0202] 35 amplification cycles, each cycle consisting of: 30 seconds denaturation at 98° C., 20 seconds annealing at 65° C., and 60 seconds extension at 72° C. p1 3 minutes at 72° C. (final extension step)

[0203] The manufacturer's protocol for preparing SMRTbell™ Libraries using PacBio® Barcoded Universal Primers for Multiplex ^{SMRT}® Sequencing was followed, using molecular barcoding.

[0204] The PCR products were visualised on agarose gel, and for all reactions that yielded a PCR product, DNA was purified from the PCR reaction, and the sequence of the PCR products was subsequently determined. Examples of PCR products on agarose gel can be seen in FIG. 1 and FIG. 2, for identification of alpha- and beta-type WOLF alleles respectively.

[0205] In Table 2 an overview is given of different sequences that were obtained in this experiment, by means of SMRT sequencing. These sequences each correspond to the LRR-domain-encoding region of a WOLF allele, and the encoded sequences of the LRR-domain are also presented. Table 2 also shows the biological material where each sequence has been amplified from, and which has been deposited with the NCIMB. All NCIMB deposit numbers are also mentioned in this table. The WOLF alleles have been named according to their type (alpha or beta), and numbered.

[0206] Beta WOLF 0 does not confer resistance and is not part of the invention.

### Example 3

### Modifying a Spinach Plant's Resistance Profile to Peronospora farinosa f. sp. spinaciae Using a Nucleic Acid Construct

[0207] Spinach plants of variety Viroflay are transformed with a number of different nucleic acid constructs, each construct comprising one or more copies of a WOLF allele. The WOLF alleles used in this experiment have been obtained from different spinach plants. The alleles were identified after sequencing the genome of a collection of spinach plants, and searching therein for alleles that have all characteristics of an alpha- or beta-type WOLF allele, as defined elsewhere in this application.

[0208] For insertion into a nucleic acid construct, the genomic sequences of WOLF alleles are PCR-amplified from the genome of the spinach plants, along with their endogenous promoter sequences. For most of the alleles the promoter is defined as a region of 2000 bp upstream from the ATG start codon of the gene. Table 3 gives an overview of the nucleic acid constructs that are used, and of the biological source they were isolated from.

[0209] Spinach transformation is performed as described (Zhang and Zeevaart, 1999, Plant Cell Rep 18: 640-645), and for each construct three independent TO transformants with a single copy of the transgene are selected. The T0 plants are then self-fertilised, and the T1 seeds produced from these selfings are collected. The T1 seeds are sown on kanamycin-containing selection medium in order to confirm again the presence of the nucleic acid construct in their genome, and successfully grown plants are transferred to soil for further development. T1 plants that harbour in their genome a single copy of the nucleic acid construct in a homozygous state are selected, and these plants are allowed to self-fertilise, and T2 seeds are harvested therefrom. These T2 seeds are grown into plants, and used for disease-resistance testing.

[0210] Disease-resistance testing of the spinach plants is performed as described in Example 1, with different pathogenic races of Peronospora farinosa f. sp. spinaciae. All 16 officially recognised pathogenic races and isolate US1508 are included in this assay, and positive and negative control plants are also included in the experiment. Suitable control plants for each race or isolate are selected from the differential reference set, and as an additional negative control, Viroflay plants harbouring an empty nucleic acid construct (i.e. the same vector as used for the experimental setup, but lacking a WOLF gene in its multicloning site) are used.

[0211] In this experiment, the following nucleic acid constructs are used, as illustrated in Table 3:

[0212] 1) The BetaWOLF_0 allele, with genomic sequence corresponding to SEQ ID No: 4, is expressed in Viroflay under control of its native promoter (SEQ ID No:5). Both sequences have been amplified from the genome of NCIMB deposit number 42463, wherein they are present in a homozygous state. The allele's coding sequence is given in SEQ ID No:6, and it encodes the protein sequence of SEQ ID No:7. In the Viroflay background, this construct does not modify the resistance profile to Peronospora farinosa f. sp. spinaciae, as it remains susceptible to all tested pathogenic races and isolates.

[0213] 2) The AlphaWOLF 2 allele, with genomic sequence corresponding to SEQ ID No:8, is expressed in Viroflay under control of its native promoter (SEQ ID No:9). Both sequences have been amplified from the genome of NCIMB deposit number 42652, wherein they are present in a heterozygous state. The allele's coding sequence is given in SEQ ID No:10, and it encodes the protein sequence of SEQ ID No:11. This construct modifies Viroflay's resistance profile to Peronospora farinosa f. sp. spinaciae: it becomes resistant to at least Pfs1 and Pfs2, and partially resistant to Pfs6.

[0214] 3) The AlphaWOLF 2a allele, with genomic sequence corresponding to SEQ ID No:12, is expressed in Viroflay under control of its native promoter (SEQ ID No:13). Both sequences have been amplified from the genome of NCIMB deposit number number 42642, wherein they are present in a homozygous state. The allele's coding sequence is given in SEQ ID No:14, and it encodes the protein sequence of SEQ ID No:15. This construct modifies Viroflay's resistance profile to Peronospora farinosa f. sp. spinaciae: it becomes resistant to at least Pfs2 and Pfs15.

[0215] 4) The BetaWOLF_3 allele, with genomic sequence corresponding to SEQ ID No:16, is expressed in Viroflay under control of its native promoter (SEQ ID No:17). Both sequences have been amplified from the genome of NCIMB deposit number 42652, wherein they are present in a heterozygous state. The allele's coding sequence is given in SEQ ID No:18, and it encodes the protein sequence of SEQ ID No:19. This construct modifies Viroflay's resistance profile to Peronospora farinosa f. sp. spinaciae: it becomes resistant to at least Pfs1, Pfs3, Pfs5, Pfs9, Pfs11, Pfs12, Pfs14, Pfs16 and US1508, and partially resistant to Pfs 8.

[0216] 5) The AlphaWOLF 4 allele, with genomic sequence corresponding to SEQ ID No:20, is expressed in Viroflay under control of its native promoter (SEQ ID No:21). Both sequences have been amplified from the genome of NCIMB deposit number 42655, wherein they are present in a heterozygous state. The allele's coding sequence is given in SEQ ID No:22, and it encodes the protein sequence of SEQ ID No:23. This construct modifies Viroflay's resistance profile to Peronospora farinosa f. sp. spinaciae: it becomes resistant to at least Pfs1, Pfs2, Pfs3, Pfs4, Pfs15 and US1508.

[0217] 6) The AlphaWOLF 4a allele, with genomic sequence corresponding to SEQ ID No:24, is expressed in Viroflay under control of its native promoter (SEQ ID No:25). Both sequences have been amplified from the genome of NCIMB deposit number 42645, wherein they are present in a homozygous state. The allele's coding sequence is given in SEQ ID No:26, and it encodes the protein sequence of SEQ ID No:27. This construct modifies Viroflay's resistance profile to Peronospora farinosa f. sp. spinaciae: it becomes resistant to at least Pfs1, Pfs2, Pfs4, Pfs15, and partially resistant to Pfs3. Isolate US1508 has not been tested.

[0218] 7) The BetaWOLF 5a and BetaWOLF 5b alleles, with genomic sequences corresponding to SEQ ID No:28 and SEQ ID No:34 respectively, are each expressed under control of their native promoters (SEQ ID No:29 and SEQ ID No:35, respectively). All sequences have been amplified from the genome of NCIMB deposit number 42649, wherein they are present in a homozygous state. Two alternative coding sequences (splice variants) of the BetaWOLF_5a allele are given in SEQ ID No:30 and SEQ ID No:31, and they encode the protein sequences of SEQ ID No:32 and SEQ ID No:33, respectively. The coding sequence of the BetaWOLF_5b allele is given in SEQ ID No:36, and it encodes the protein sequence of SEQ ID No:37. This construct comprising the BetaWOLF_5a and BetaWOLF_5b alleles modifies Viroflay's resistance profile to Peronospora farinosa f. sp. spinaciae: it becomes resistant to at least Pfs1, Pfs3 and Pfs5.

[0219] 8) The AlphaWOLF_6 allele, with genomic sequence corresponding to SEQ ID No:38, is expressed in Viroflay under control of its native promoter (SEQ ID No:39). Both sequences have been amplified from the genome of NCIMB deposit number 42654, wherein they are present in a heterozygous state. Two alternative coding sequences (splice variants) of the AlphaWOLF_6 allele are given in SEQ ID No:40 and SEQ ID No:41, and they encode the protein sequences of SEQ ID No:42 and SEQ ID No:43, respectively. This construct modifies Viroflay's resistance profile to Peronospora farinosa f. sp. spinaciae: it becomes resistant to at least Pfs1, Pfs2, Pfs3, Pfs4, Pfs5, Pfs6, Pfs9, Pfs11, Pfs12, Pfs13, Pfs14 and Pfs15.

[0220] 9) The AlphaWOLF_6b and BetaWOLF_6b alleles, with genomic sequences corresponding to SEQ ID No:44 and SEQ ID No:50 respectively, are each expressed under control of their native promoters (SEQ ID No:45 and SEQ ID No:51, respectively). All sequences have been amplified from the genome of NCIMB deposit number 42648, wherein they are present in a homozygous state. Two alternative coding sequences (splice variants) of the AlphaWOLF_6b allele are given in SEQ ID No:46 and SEQ ID No:47, and they encode the protein sequences of SEQ ID No:48 and SEQ ID No:49, respectively. The coding sequence of the BetaWOLF 6b allele is given in SEQ ID No:52, and it encodes the protein sequence of SEQ ID No:53. This construct comprising the AlphaWOLF 6b and BetaWOLF 6b alleles modifies Viroflay's resistance profile to Peronospora farinosa f. sp. spinaciae: it becomes resistant to at least Pfs1, Pfs2, Pfs3, Pfs4, Pfs5, Pfs6, Pfs9, Pfs11, Pfs12, Pfs13, Pfs14, Pfs15 and US1508.

[0221] 10) The AlphaWOLF_6c allele, with genomic sequence corresponding to SEQ ID No:54, is expressed in Viroflay under control of its native promoter (SEQ ID No:55). Both sequences have been amplified from the genome of NCIMB deposit number 42644, wherein they are present in a homozygous state. Two alternative coding sequences (splice variants) of the AlphaWOLF_6c allele are given in SEQ ID No:56 and SEQ ID No:57, and they encode the protein sequences of SEQ ID No:58 and SEQ ID No:59, respectively. This construct modifies Viroflay's resistance profile to Peronospora farinosa f. sp. spinaciae: it becomes resistant to at least Pfs1, Pfs2, Pfs3, Pfs4, Pfs5, Pfs6, Pfs9, Pfs11, Pfs12, Pfs13, Pfs14, Pfs15 and US1508.

[0222] 11) The AlphaWOLF 7 allele, with genomic sequence corresponding to SEQ ID No:60, is expressed in Viroflay under control of its native promoter (SEQ ID No:61). Both sequences have been amplified from the genome of NCIMB deposit number 42653, wherein they are present in a heterozygous state. The allele's coding sequence is given in SEQ ID No:62, and it encodes the protein sequence of SEQ ID No:63. This construct modifies Viroflay's resistance profile to Peronospora farinosa f. sp. spinaciae: it becomes resistant to at least Pfs1, Pfs2, Pfs3, Pfs4, Pfs5, Pfs6, Pfs7, Pfs9, Pfs11, Pfs13, Pfs15, Pfs16 and US1508.

[0223] 12) The AlphaWOLF_8 allele, with genomic sequence corresponding to SEQ ID No:64, is expressed in Viroflay under control of its native promoter (SEQ ID No:65). Both sequences have been amplified from the genome of NCIMB deposit number 42646, wherein they are present in a homozygous state. Three alternative coding sequences (splice variants) of the AlphaWOLF 8 allele are given in SEQ ID No:66, SEQ ID No:67 and SEQ ID No:68, and they encode the protein sequences of SEQ ID No:69, SEQ ID No:70 and SEQ ID No:71, respectively. This construct modifies Viroflay's resistance profile to Peronospora farinosa f. sp. spinaciae: when the construct is present in homozygous state the plant becomes resistant to at least Pfs1, Pfs2, Pfs6, Pfs8 and Pfs15, and partially resistant to Pfs5, Pfs10 and Pfs16.

[0224] 13) The AlphaWOLF 10 allele, with genomic sequence corresponding to SEQ ID No:72, is expressed in Viroflay under control of its native promoter (SEQ ID No:73). Both sequences have been amplified from the genome of NCIMB deposit number 42656, wherein they are present in a heterozygous state. The allele's coding sequence is given in SEQ ID No:74, and it encodes the protein sequence of SEQ ID No:75. This construct modifies Viroflay's resistance profile to Peronospora farinosa f. sp. spinaciae: it becomes resistant to at least Pfs1, Pfs2, Pfs3, Pfs4, Pfs5, Pfs6, Pfs7, Pfs8, Pfs9, Pfs10 and Pfs15.

[0225] 14) The AlphaWOLF 15 allele, with genomic sequence corresponding to SEQ ID No:76, is expressed in Viroflay under control of its native promoter (SEQ ID No:77). Both sequences have been amplified from the genome of NCIMB deposit number 42466, wherein they are present in a homozygous state. Two alternative coding sequences (splice variants) of the AlphaWOLF_6c allele are given in SEQ ID No:78 and SEQ ID No:79, and they encode the protein sequences of SEQ ID No:80 and SEQ ID No:81, respectively. This construct modifies Viroflay's resistance profile to Peronospora farinosa f. sp. spinaciae: when the construct is present in homozygous state the plant becomes resistant to at least Pfs1, Pfs2, Pfs3, Pfs4, Pfs5, Pfs6, Pfs8, Pfs9, Pfs11, Pfs12, Pfs13, Pfs14, Pfs15 and US1508, and partially resistant to Pfs10.

[0226] 15) The AlphaWOLF_9 and BetaWOLF_9 alleles, with genomic sequences corresponding to SEQ ID No:82 and SEQ ID No:86 respectively, are each expressed under control of their native promoters (SEQ ID No:83 and SEQ ID No:87, respectively). All sequences have been amplified from the genome of NCIMB deposit number 42656, wherein they are present in a heterozygous state. The coding sequence of the AlphaWOLF_9 allele is given in SEQ ID No:84, and it encodes the protein sequence of SEQ ID No:85. The coding sequence of the BetaWOLF_9 allele is given in SEQ ID No:88, and it encodes the protein sequence of SEQ ID No:89. This construct comprising the AlphaWOLF_9 and BetaWOLF_9 alleles modifies Viroflay's resistance profile to Peronospora farinosa f. sp. spinaciae: it becomes resistant to at least Pfs1, Pfs2, Pfs3, Pfs4, Pfs5, Pfs6, Pfs7, Pfs8, Pfs9, Pfs10, Pfs11, Pfs12 and Pfs13.

[0227] 16) The AlphaWOLF_11 and BetaWOLF_11 alleles, with genomic sequences corresponding to SEQ ID No:90 and SEQ ID No:96 respectively, are each expressed under control of their native promoters (SEQ ID No:91 and SEQ ID No:97, respectively). All sequences have been amplified from the genome of NCIMB deposit number 42647, wherein they are present in a homozygous state. Two alternative coding sequences (splice variants) of the AlphaWOLF_11 allele are given in SEQ ID No:92 and SEQ ID No:93, and they encode the protein sequences of SEQ ID No:94 and SEQ ID No:95, respectively. Two alternative coding sequences (splice variants) of the BetaWOLF_11 allele are given in SEQ ID No:98 and SEQ ID No:99, and they encode the protein sequences of SEQ ID No:100 and SEQ ID No:101, respectively. This construct comprising the AlphaWOLF_11 and BetaWOLF_11 alleles modifies Viroflay's resistance profile to Peronospora farinosa f. sp. spinaciae: when the construct is present in homozygous state the plant becomes resistant to at least Pfs1, Pfs3, Pfs4, Pfs5, Pfs7, Pfs11, Pfs13, Pfs15, Pfs16 and US1508, and partially resistant to Pfs6.

[0228] 17) The AlphaWOLF_12 allele, with genomic sequence corresponding to SEQ ID No:102, is expressed in Viroflay under control of its native promoter (SEQ ID No:103). Both sequences have been amplified from the genome of NCIMB deposit number 42650, wherein they are present in a heterozygous state. Two alternative coding sequences (splice variants) of the AlphaWOLF_12 allele are given in SEQ ID No:104 and SEQ ID No:105, and they encode the protein sequences of SEQ ID No:106 and SEQ ID No:107, respectively. This construct modifies Viroflay's resistance profile to Peronospora farinosa f. sp. spinaciae: it becomes resistant to at least Pfs1, Pfs2, Pfs3, Pfs4, Pfs6, Pfs7, Pfs8, Pfs9, Pfs10, Pfs11, Pfs12 and Pfs13.

[0229] 18) The AlphaWOLF_16 allele, with genomic sequence corresponding to SEQ ID No:145, is expressed in Viroflay under control of its native promoter (SEQ ID No:146). Both sequences have been amplified from the genome of NCIMB deposit number 42820, wherein they are present in a homozygous state. Two alternative coding sequences (splice variants) of the AlphaWOLF_16 allele are given in SEQ ID No:147 and SEQ ID No:148, and they encode the protein sequences of SEQ ID No:149 and SEQ ID No:150, respectively. This construct modifies Viroflay's resistance profile to Peronospora farinosa f. sp. spinaciae: it becomes resistant to at least Pfs1, Pfs2, Pfs3, Pfs4, Pfs5, Pfs11, Pfs12, Pfs13, Pfs14, Pfs15 and US1508.

[0230] 19) The AlphaWOLF_18 allele, with genomic sequence corresponding to SEQ ID No:155, is expressed in Viroflay under control of its native promoter (SEQ ID No:156). Both sequences have been amplified from the genome of NCIMB deposit number 42819, wherein they are present in a homozygous state. Two alternative coding sequences (splice variants) of the AlphaWOLF_18 allele are given in SEQ ID No:157 and SEQ ID No:158, and they encode the protein sequences of SEQ ID No:159 and SEQ ID No:160, respectively. This construct modifies Viroflay's resistance profile to Peronospora farinosa f. sp. spinaciae: it becomes resistant to at least Pfs10, Pfs13, Pfs14 and Pfs15.

[0231] As illustrated by Table 3, introducing one or more WOLF alleles into the genome of a spinach plant thus results in a modification of the resistance profile to Peronospora farinosa f. sp. spinaciae.

[0232] In another experiment, a spinach plant that is already resistant to various pathogenic races and isolates of Peronospora farinosa f. sp. spinaciae is transformed with a number of different nucleic acid constructs, each construct comprising one or more copies of a WOLF allele. The approach is similar as described above, with the exception that—unlike—Viroflay—the transformed plant already displays a certain resistance profile. This approach allows the stacking of WOLF alleles in a spinach plant's genome, to further modify and/or strengthen that plant's resistance profile.

[0233] The AlphaWOLF_7 allele, with genomic sequence corresponding to SEQ ID No:60, is expressed in a plant from deposit NCIMB 42466 under control of its native promoter (SEQ ID No:61). Both sequences have been amplified from the genome of NCIMB deposit number 42653, wherein they are present in a heterozygous state. The allele's coding sequence is given in SEQ ID No:62, and it encodes the protein sequence of SEQ ID No:63. This construct modifies the transformed plant's resistance profile to Peronospora farinosa f. sp. spinaciae. Said plant was already resistant to Pfs1, Pfs2, Pfs3, Pfs4, Pfs5, Pfs6, Pfs8, Pfs9, Pfs11, Pfs12, Pfs13, Pfs14, Pfs15 and US1508, and partially resistant to Pfs10, but after introduction of said nucleic acid construct its resistance profile is broadened: it now also becomes resistant to Pfs7 and Pfs16, but remains partially resistant to Pfs10. This transformed plant is thus (at least partially) resistant to all 17 pathogenic races and isolates that have been used in our phenotypical test.

### Example 4

### Identifying and Selecting a New WOLF Allele

[0234] The knowledge that the WOLF gene is responsible for resistance to Peronospora farinosa f. sp. spinaciae makes it possible to identify plants carrying new alleles with a new resistance profile that, upon introduction into the genome of a spinach plant, modifies the resistance profile of said spinach plant to Peronospora farinosa f. sp. spinaciae. In the search for possible new WOLF alleles a part of the internal gene bank collection was screened by determining the sequence of the LRR domain of the WOLF gene as described in Example 2.

[0235] These sequences were translated into amino acid sequences and subsequently evaluated by comparing them with the already identified amino acid sequences of the LRR domains of alpha/beta alleles 0 to 15 as mentioned in Table 2. Identical or substantially identical sequences, i.e. sequences that have silent mutations or mutations leading to a conserved amino acid change were discarded as well as sequences that have mutations leading to premature stop codons and/or frameshifts.

[0236] The accessions that remained were multiplied and subjected to seedling tests for several different races of Peronospora farinosa f. sp. spinaciae. The results of these seedling tests showed that seven new alpha-WOLF alleles were identified having a unique sequence and resistance profile. These seven alleles were denominated Alpha-WOLF 16 to 22 and were added to Tables 2 and 3. These alleles are all candidates for developing parent lines for new spinach varieties with an extended resistance profile. For example, the accession carrying the Alpha-WOLF 19 was used to develop a parental line. This parental line was combined with a parental line carrying the alpha-WOLF 7 allele leading to a hybrid variety resistant against pfs:1-16 and isolate US1508.

[0237] The alpha-WOLF 16 allele has a genomic sequence corresponding to SEQ ID No:145 and has a LRR domain with a nucleotide and amino acid sequence corresponding to SEQ ID No:151 and SEQ ID No 152, respectively. The alpha-WOLF 16 allele is homozygously present in a seeds deposited under NCIMB 42820. The homozygous presence of Alpha WOLF 16 allele in a spinach plant leads to resistance against at least Peronospora farinosa f. sp. spinaciae races Pfs1, Pfs2, Pfs3, Pfs4, Pfs5, Pfs11, Pfs12, Pfs13, Pfs14, Pfs15 and US1508.

[0238] The alpha-WOLF 17 allele has a LRR domain with a nucleotide and amino acid sequence corresponding to SEQ ID No:153 and SEQ ID No 154, respectively. The alpha-WOLF 17 allele is homozygously present in a seeds deposited under NCIMB 42818. The homozygous presence of Alpha WOLF 17 allele in a spinach plant leads to resistance against at least Peronospora farinosa f. sp. spinaciae races Pfs2, Pfs4, Pfs11, Pfs12, Pfs13, Pfs14 and Pfs15.

[0239] The alpha-WOLF 18 allele has a genomic sequence corresponding to SEQ ID No:155 and having a LRR domain with a nucleotide and amino acid sequence corresponding to SEQ ID No:161 and SEQ ID No 162, respectively. The alpha-WOLF 18 allele is homozygously present in a seeds deposited under NCIMB 42819. The homozygous presence of Alpha WOLF 19 allele in a spinach plant leads to resistance against at least Peronospora farinosa f. sp. spinaciae races Pfs10, Pfs13 and Pfs14.

[0240] The alpha-WOLF 19 allele has a LRR domain with a nucleotide and amino acid sequence corresponding to SEQ ID No:163 and SEQ ID No 164, respectively. The alpha-WOLF 19 allele is homozygously present in a seeds deposited under NCIMB 42822. The homozygous presence of Alpha WOLF 19 allele in a spinach plant leads to resistance against at least Peronospora farinosa f. sp. spinaciae races Pfs1, Pfs2, Pfs3, Pfs5, Pfs6, Pfs7, Pfs8, Pfs9, Pfs10 Pfs 11, Pfs12, Pfs13, Pfs14, Pfs15 and intermediate resistance to Pfs4.

[0241] The alpha-WOLF 20 allele has a LRR domain with a nucleotide and amino acid sequence corresponding to SEQ ID No:165 and SEQ ID No 166, respectively. The alpha-WOLF 20 allele is homozygously present in a seeds deposited under NCIMB 42821. The homozygous presence of Alpha WOLF 20 allele in a spinach plant leads to resistance against at least Peronospora farinosa f. sp. spinaciae races Pfs1, Pfs2, Pfs3, Pfs4, Pfs6, Pfs7, Pfs8, Pfs9, Pfs10, Pfs11 and Pfs12.

[0242] The alpha-WOLF 21 allele has a LRR domain with a nucleotide and amino acid sequence corresponding to SEQ ID No:167 and SEQ ID No 168, respectively. The homozygous presence of Alpha WOLF 21 allele in a spinach plant leads to resistance against at least Peronospora farinosa f. sp. spinaciae races Pfs1, Pfs3, Pfs4, Pfs5, Pfs6, Pfs8, Pfs9, Pfs10, Pfs15 and intermediate resistance to Pfs2 and Pfs 7.

[0243] The alpha-WOLF 22 allele has a LRR domain with a nucleotide and amino acid sequence corresponding to SEQ ID No:165 and SEQ ID No 166, respectively. The homozygous presence of Alpha WOLF 22 allele in a spinach plant leads to resistance against at least Peronospora farinosa f. sp. spinaciae races Pfs1, Pfs2, Pfs6, Pfs8 and Pfs15.

[0244] The invention is further described by the following numbered paragraphs:

[0245] 1. A method for modifying the resistance profile of a spinach plant to Peronospora farinosa f. sp. spinaciae, comprising introducing a WOLF allele or a resistance-conferring part thereof into the genome of said spinach plant, or modifying an endogenous WOLF allele in the genome of said spinach plant, wherein the WOLF allele encodes a CC-NB S-LRR protein that comprises in its amino acid sequence:

[0246] a) the motif “MAEIGYSVC” at its N-terminus, and

[0247] b) the motif “KWMCLR” or “HVGCVVDR”.

[0248] 2. The method of paragraph 1, wherein the WOLF allele encodes a WOLF protein according to any one of SEQ ID NOs referred to in Table 3.

[0249] 3. The method of paragraph 1 or 2, wherein introducing a WOLF allele into the genome of a spinach plant comprises the step of expressing in a spinach cell a recombinant nucleic acid construct comprising a coding sequence encoding one or more WOLF polypeptides.

[0250] 4. The method of paragraph 3, wherein the nucleic acid construct is designed for stable incorporation into the genome of a plant cell.

[0251] 5. The method of paragraph 1, wherein modifying the endogenous WOLF allele is achieved by means of genome editing techniques or mutagenesis techniques.

[0252] 6. The method of paragraph 5, wherein the endogenous WOLF allele is replaced by a modified WOLF allele by means of genome editing techniques.

[0253] 7. A spinach plant comprising a WOLF allele as defined in paragraph 1.

[0254] 8. The spinach plant of paragraph 7, which is obtainable by the method of any one of the paragraphs 1-6.

[0255] 9. The spinach plant according to paragraph 7 or 8, having a modified resistance profile to Peronospora farinosa f. sp. spinaciae as compared to an isogenic spinach plant that has not been modified by the method of any one of the paragraphs 1-6.

[0256] 10. A spinach plant comprising one or more WOLF alleles, wherein said WOLF allele is selected from the nucleotide sequences referred to in Table 3 or is a nucleotide sequence encoding a polypeptide having an amino acid sequence referred to in Table 3 or is a nucleotide sequence encoding a polypeptide having a sequence similarity of 95%, 96%, 97%, 98%, or 99% with any one of the amino acid sequences referred to in Table 3, or a having a sequence similarity of 95%, 96%, 97%, 98%, or 99% with any one of the nucleotide sequences referred to in Table 3.

[0257] 11. Propagation material of a plant of any one of the paragraphs 7-10, wherein a plant grown or regenerated from the material comprises a resistance-conferring WOLF allele as defined in paragraph 1.

[0258] 12. A cell of a spinach plant of any one of the paragraphs 7-10, which cell comprises a WOLF allele as defined in paragraph 1.

[0259] 13. A seed capable of growing into a spinach plant of any one of the paragraphs 7-10.

[0260] 14. Harvested leaves of a spinach plant of any one of the paragraphs 7-10.

[0261] 15. A food product comprising the harvested leaves of paragraph 14.

[0262] 16. A WOLF allele having a nucleotide sequence selected from SEQ ID No:8, SEQ ID No:12, SEQ ID No:16, SEQ ID No:20, SEQ ID No:24, SEQ ID No:28, SEQ ID No:34, SEQ ID No:38, SEQ ID No:44, SEQ ID No:50, SEQ ID No:54, SEQ ID No:60, SEQ ID No:64, SEQ ID No:72, SEQ ID No:76, SEQ ID No:82, SEQ ID No:86, SEQ ID No:90, SEQ ID No:96, SEQ ID No:102, SEQ ID No:145, SEQ ID No:155.

[0263] 17. A vector comprising a WOLF allele according to paragraph 16.

[0264] 18. A spinach plant comprising the vector of paragraph 17.

[0265] 19. A method for selecting a spinach plant comprising a novel WOLF allele that confers resistance to Peronospora farinosa f. sp. spinaciae in a spinach plant, comprising:

[0266] a) determining the sequence of the LRR domain or part thereof of a WOLF allele in the genome of a spinach plant;

[0267] b) comparing said sequence to the sequences referred to in Table 3;

[0268] c) if the sequence of the LRR domain or part thereof is substantially different from the sequences referred to in Table 3, select the spinach plant that harbours said sequence in its genome as a spinach plant that comprises a novel WOLF allele.

[0269] 20. The method of paragraph 19, wherein the selected plants are subsequently tested for their resistance to different pathogenic races of Peronospora farinosa f. sp. spinaciae.

[0270] 21. A method for identifying a WOLF allele that confers resistance to one or more pathogenic races of Peronospora farinosa f. sp. spinaciae in a spinach plant, comprising:

[0271] a) phenotypically selecting a spinach plant that is resistant to one or more pathogenic races of Peronospora farinosa f. sp. spinaciae;

[0272] b) determining the sequence of the LRR domain or part thereof of a WOLF allele that is present in the genome of said spinach plant, and

[0273] c) optionally comparing the sequence to a reference sequence representing the WOLF gene to be identified.

[0274] 22. The method of paragraphs 19, 20 or 21, wherein part of a WOLF allele is amplified from the plant's genome by means of PCR.

[0275] 23. A primer pair for amplifying the LRR domain or part thereof of a WOLF allele from the genome of a spinach plant, wherein the forward primer is a nucleic acid molecule comprising the sequence of SEQ ID No:1 or SEQ ID No:3, and the reverse primer is a nucleic acid molecule comprising the sequence of SEQ ID No:2.

[0276] 24. Use of a primer pair of paragraph 23 for identifying novel WOLF alleles as defined in paragraph 1.

[0277] 25. Use of a WOLF allele or part thereof as a marker in breeding or in producing a spinach plant that is resistant to Peronospora farinosa f. sp. spinaciae.

[0278] 26. An allele of an alpha-WOLF gene, wherein the protein encoded by said allele is a CC-NBS-LRR protein that comprises in its amino acid sequence: a) the motif “MAEIGYSVC” at its N-terminus; and b) the motif “KWMCLR”; and wherein the LRR domain of the protein has in order of increased preference 50%, 55%, 60%, 65%, 70%, 75%, 80%, 82%, 85%, 87%, 90%, 91%, 92%, 93%, 94%, 95%, 96%, 97%, 98%, 99%, sequence similarity to any one of the amino acid sequences having SEQ ID No:111. SEQ ID No:113, SEQ ID No:117, SEQ ID No:118, SEQ ID No:119, SEQ ID No:121, SEQ ID No:123, SEQ ID No:125, SEQ ID No:127, SEQ ID No:129, SEQ ID No:131, SEQ ID No:133, SEQ ID No:135, SEQ ID No:139, SEQ ID No: 152, SEQ ID No:154, SEQ ID No:162, SEQ ID No:164, SEQ ID No:166, SEQ ID No:168, SEQ ID No:170; and wherein the allele when present in a spinach plant confers resistant to one or more Peronospora farinosa f. sp. spinaciae races or isolates.

[0279] 27. An allele of a beta-WOLF gene, wherein the protein encoded by said allele is a CC-NB S-LRR protein that comprises in its amino acid sequence: a) the motif “MAEIGYSVC” at its N-terminus; and b) the motif “HVGCVVDR”; and wherein the LRR domain of the protein has in order of increased preference 50%, 55%, 60%, 65%, 70%, 75%, 80%, 82%, 85%, 87%, 90%, 91%, 92%, 93%, 94%, 95%, 96%, 97%, 98%, 99%, sequence similarity to any one of the amino acid sequences having SEQ ID No:109, SEQ ID No:115. SEQ ID No:137; and wherein the allele when present in a spinach plant confers resistant to one or more Peronospora farinosa f. sp. spinaciae races or isolates.

[0280] 28. A spinach plant comprising a WOLF allele as defined in paragraph 1, wherein the LRR domain of the WOLF allele has an amino acid sequence selected from the group consisting of SEQ ID No:109, SEQ ID No:111. SEQ ID No:113, SEQ ID No:115, SEQ ID No:117, SEQ ID No:118, SEQ ID No:119, SEQ ID No:121, SEQ ID No:123, SEQ ID No:125, SEQ ID No:127, SEQ ID No:129, SEQ ID No:131, SEQ ID No:133, SEQ ID No:135, SEQ ID No:137, SEQ ID No:139, SEQ ID No: 152, SEQ ID No:154, SEQ ID No:162, SEQ ID No:164, SEQ ID No:166, SEQ ID No:168, and SEQ ID No:170.

[0281] 29. A hybrid spinach plant comprising two WOLF alleles as defined in paragraph 1, wherein the LRR domain of the first WOLF allele and second WOLF allele each have an amino acid sequence selected from the group consisting of SEQ ID No:109, SEQ ID No:111. SEQ ID No:113, SEQ ID No:115, SEQ ID No:117, SEQ ID No:118, SEQ ID No:119, SEQ ID No:121, SEQ ID No:123, SEQ ID No:125, SEQ ID No:127, SEQ ID No:129, SEQ ID No:131, SEQ ID No:133, SEQ ID No:135, SEQ ID No:137, SEQ ID No:139, SEQ ID No: 152, SEQ ID No:154, SEQ ID No:162, SEQ ID No:164, SEQ ID No:166, SEQ ID No:168, and SEQ ID No:170.

[0282] 30. A hybrid spinach plant of paragraph 29, wherein the first and second allele are selected such that the combination of the two alleles provides resistance to races Pfs1, Pfs2, Pfs3, Pfs4, Pfs5, Pfs6, Pfs7, Pfs8, Pfs9, Pfs10, Pfs11, Pfs12, Pfs13, Pfs14, Pfs15 and Pfs16 and optionally isolate US1508.

[0283] Having thus described in detail preferred embodiments of the present invention, it is to be understood that the invention defined by the above paragraphs is not to be limited to particular details set forth in the above description as many apparent variations thereof are possible without departing from the spirit or scope of the present invention.

The application's sequence listing, which the Patent Office published only in electronic form, follows.

SEQUENCE LISTING (170 sequences)

SEQ ID NO: 1 - DNA, 20 bp, Spinacia oleracea
  Primer
acaagtggatgtgtcttagg

SEQ ID NO: 2 - DNA, 19 bp, Spinacia oleracea
  Primer
ttcgccctcatcttcctgg

SEQ ID NO: 3 - DNA, 18 bp, Spinacia oleracea
  Primer
tcacgtgggttgtgttgt

SEQ ID NO: 4 - DNA, 6262 bp, Spinacia oleracea
atggctgaaatcggatactcggtttgttcaaaacttattgaagtgatgggcagtaagatcattaaagagatttgcgacatgtggggttacaattctcatcttgaagacctcaacaaatctgtcttgacgatcaaggatgtgctcttggatgctgaggcgaagcgggatctttcccgtgaacaacagagttacattgcagaacttaaggatgttgtttacgatgctgatgatttgttcgatgagttcctcactcttgctgagctcaaacagattgatggcaacaacaagggtggtggtaaattctccaaaaaggtacgtcgtttcttttcttctaataaggagaagatgggtcaagcttacaagatgtctcatatggttaaagaaattaagaagcagttgggtgaaattgttgataggtataccaaatttgggtttattgttgattataaacctattattaggagaagggaggaaacatgttcttattttgtaggtgccaaggagattgttgggagggataaggataaagatgttatcataggcatgttgctagatcatgataacgattgtagtttcttggctgttgtgggggttggaggggtgggaaaaactactcttgcccaacttgtgtataatgatgaaagagtcaaaagtgagttccaagatttgaggtattgggtttgtgtctctgatcaagatgggggacaatttgatgacaaaagaattctttgtaagattatagagttagttacgggccagattcctccgagtaacgagagcatggaatcggtgcgtaagaaatttcaagaggaattaggaggaaagaagtacttccttgttcttgatgatgtatggaacgaggatcgccagaagtggcttcatctagaaaatttcttgaaattgggtcaagggggaagcaagattgtggtaaccacacgttcagagaagacggcaaatgttatagggaaaagacaagactataaactagaatgtttgtcagcagaggattcatggcgcttatttgaaatgtcagcttttgacgaagggcatggccaggaaaactatgacgaattagtgacgattggcaagaagattgttgaaaaatgttataacaatccacttgctataacagtggtaggaagccttctttttggacaagagataaataagtggcggtcgtttgaaagcagtggattagcccaaattgccaatggtgataatcagattttcccgatattaaagctcagttaccacaatcttccacactccttgaagagctgctttagctattgtgcagtgtttcccaaagattatgaaataaagaaggagatgttgattgatctttggatagcacaaggatacattataccgttggatggaggtcaaagtatagaagatgctgccgaggaacattttgtaattttgttaagaagatgtttctttcaagatgtaaagaaggattctcttggtaatgttgattatgttaaaatccacgacttaatgcacgatgtcgctcaagaagtggggaaggaggaaatctgtgtagtgacttcaggtacaaagaagttggctgataaaatccgtcacgtgggttgtgttgtcgatagagatccagaaatagtctttttatgtagcaataagattcgttcgtatattagcggtcgctgcataaagaatccggtggattcacaaatagacaactggatgtgccttagggtgttggacttgtcagattcatgtgttaaagatttgtctgattcaataggtaagctgctgcacttaaggtatcttaacctctcttctaatataaagttggagataatccctgatgcaattacaagactgcataacttgcagacactacttttagaagattgcagaagtttaaaggagttgccaaaagatttttgcaaattggtcaaactgaggcacttggaattacagggttgtcatgatttgattggtatgtcatttggaatggataagctaactagtcttagaatactaccaaacattgtggtgggtaggaaggaacaaagtgttgatgatgagctgaaagccctaaaaggcctcaccgagataaaaggctccattgatatcacaatctattcaaaatatagaagagttgaaggcatgaatggcacaggaggaggagctgggtatttgaagagcatgaaacatctcacgggggttaatattacatttgatgaaggtggatgtgttaaccctgaagctgtgtatttgaagagcatgaaacatctcacgagggttattattatatttgattataaaggtggatgtgttaaccctgaagctgtgttggcaaccctagagccaccttcaaatatcaagaggttagagatgtggcattacagtggtacaacaattccagtatggggaagagcagagattaattgggcaatctccctctcacatcttgtcgacatcacgcttgaagattgttacaatttgcaggagatgccagtgctgagtaaactgcctcatttgaaatcactggaacttacagagttggataacttagagtacatggagagtagaagcagcagcagtagcagtgacacagaagcagcaacaccagaattaccaacattcttcccttcccttgaaaaacttacactttggcgtctggacaagttgaagggttttgggaacaggagatcgagtagttttccccgcctctctaaattggaaatctggaaatgtccagatctaacgtcatttccttcttgtccaagccttgaagagttggaattgaaagaaaacaatgaagcgttgcaaataatagtaaaaataacaacaacaagaggtaaagaagaaaaagaagaagacaagaatgctggtgttggaaattcacaagatgatgacaatgtcaaattatggaaggtggaaatagacaatctgggttatctcaaatcactgcccacaaattgtctgactcacctcgaccttacaataagtgattccaaggagggggagggtgaatgggaagttggggatgcatttcagaagtgtgtatcttctttgagaagcctcaccataatcggaaatcacggaataaataaagtgaagagactgtctggaagaacagggttggagcatttcactctgttggaatcactcaaactttcagatatagaagaccaggaagatgagggcgaagacaacatcatattctggaaatcctttcctcaaaacctccgcagtttgagaattaaagactctgacaaaatgacaagtttgcccatggggatgcagtacttaacctccctccaaaccctctatctacaccattgttatgaattgaattcccttccagaatggataagcagcttatcatctcttcaatacctgcgcatatactactgtccagccctgaaatcactaccagaagcaatgcggaacctcacctcccttcagacacttgggatatcggattgtccagacctagttaaaagatgcagaaaacccaacggcaaggactatcccaaaattcaacacatccccaaaattgtaagtcattgcagaaagtaatttattcatttatatttattttatgcttagaatgatatacgcagtcgtcctttggtttcaaatcttgaatttggtttttgttttctttctttgtttctttattcaacaccagcccatttatgattgattcattaaaaaaaggatggagttttatggatttgaagaagacaacgaattgagattcctggggttttctttttgttggggttggatttcatgtatatgttgctgattaaatacgagactgatgatgatgatgtgtttatgggttttaaatcagattaaatatatgggaaatgtaagttagttggggatgcacataaggtgtttgatgaaatgtctatgagaaatgttgtttcttggacttagaatgatatacactgtcgtcctttggtttccaatctggaatttggtttttgttttcttagtttgtttctttattccacactagcccattttttttaaactacctgcaactactgaatttcatttaccctgtatctcagattatatggtagtaattctcatttactcaacactagcttgatcctgaacgcagccaaccttcaggttagaatccgccttactcatccttttgtcatgaattgttttaagttgttttgcttgcttgtgtaatcataattcatagtatacgattcatcattcactatgtctataggcaagatattggaattgttcacgatttcctgaagtttctttgtttttgttgataccaccatattgcagcttatagtgactaagttaatgaatgtttccaaaaattagtcatataaattcttcttctctctctattacataaaccctttttctctttctaacttatcatgttcatgtctaaaacgtatacatgctcacatcattgttcgtttcagctgacttacttatgtaagagagctatctagttaacaactcttgtaactttttatttgctagtcagaacatggattggtgcaagcatgggaatatgctaacactctaccaaatcgattggagtttggacttagtttcaccagaagccatacccggacacttactggggactgtcaacaaagccgcattgtgatgtacttggatgtttcacgtgcctgaggtgcgagttacttggaagggaagcggtttatttaattgttttcccaagtagattttgcttacaagcttttacttttcacttgaaagggtttttcttgttttaagcttttcgaattagagttttcggttgcattaagagtagtcgtattagtcttttacctaaggaagactcttttttgtaattttcagactatgcaattcaagttttcgagtgttttcttgcttgtgtgattgtgagttggtgaattcgtctttcatacattttgagattatcagaagcttttatgctccaccggtagtctagtaccttttctgttactgtgcagggaagtaatctggtaccttctatatatatggaaaaacatacattatacattatgcaaaattcttacaggttagttacttcctggaacttcatttacacttagttttttttgttccattccctcggaatcaagtcattccctctgagaaatatgtaatgaacttctgtatgttgctgtttggttcctgttttaatcttcaattttcttgtatagttacagctgcatttacaatgaagtttaagcagacactctctttatatagtgcctctttctggagcaccgtagagctgtctgtggttgatcaccatctgctgccgagagattcagcaatcgcgtgtttgatcaggtaaaagtttttatgtcaatgtgtttttttttccgtttgatcaatttatgtctgtattcagattcttatcttcttacagtagcataacacattgtttctttcatttatgtaatctgtttcaagattacagagatgtatgcttcagtcgacattgatgataacttaagatggcattcctacaacagttgcaggcgcattctaactccggcaattctagttaggcaagaggagcattgccaatacctgccacctctgggatttactataccagggttgaagtttatggaagacaccagctatgcacaagccttcaaggggtcatcctacataacaagttgaaccaaccaattgcttgttggttcagtggtaattggagctgaatttggtagggatgacccgtgttcgatccccacaacaacaattgggaggggactggaacctatccacacagaactcgccctgaatccggattagccctaagggtgaacggggtgctaacaccaaaaaaaaaaacataacaagttgaaccaaacatactttgtttgaattgaagatttagtgatttcatttgatcgattgagatgtcttattataagcgtatatgctcttggatttggccacttaggtgttgtttgacaattggtcattaactcgcttttatattttcttttctcttaggaaaggtgatcctgagaatttatattggaacactttttttttctcactagctttaaaaaagtgttctgtgttacctgcaattcaatttgattatttttcacatagttttacctgaaaaagtgttacctgaaaaagtgttacctgaaaatcaactgacataagtttttgtttggatccaattaaggacactagataaatcggaataaataatcaaccaattaagtacttcataattaaatatgaagtgtat

SEQ ID NO: 5 - DNA, 2000 bp, Spinacia oleracea
tctttggttttttggtccacaactccacactaagaggaactccaatgcttagttacaaggtggtgtagttaaaaagtaactccaatagttaactacacggtattatagttaaatttgccaactcaaatttctaactacaatatatttaagctacaaagtttctcattggctgactacaatacgttgtagcgccttataatattttattcaatatacaattttatttattttacctttttaacaattttttttgatctacctgctgtcctgttcatatgagctacactaatttgatagctgcttacgcaattcttatatcaacggttggctacttgttcaaatatttttatttttttacgagtaagtcattttatgatcattgaagtggctctattattattatcatgcaccgattaacgcaagaataattaactcggtacgaattagtttcaaaataaaatccctcaaaaaaaaaagtttcaaaataaaattaacagaaaaccaaccttctccggtttactgttgttagagcatggaattttccagtaatcgcagaccccaaattatcttccagttgaatcaatccttgatttttggatttgccagaaaactccttgaattttagggttcatatttgatccgtaattgggaaaattttcagcaattgatcttccaaatcagccctacttgtttccagactgcaaatgaaaggtgcgaactttatactgcattttggttttccattagtgtaatttagtgtaatttattaagataaactgcattttgcaattgttttattcgactactcatttttaaatcaaattgcttaattgctagttagttttcttatcatattgccaaaaaaaattatttttgtttaactggtgaaaaagggtaaattataccactgttaatttgttgacacatcatcaaacgtactgaaaaatgagaatgaaagacaataaatatgttattttaaccaatagaaaaacatgatgagtaagatccttaattgatagataaataattaaatatcagtccattagttgaatattcaatgaaaatgtatggtccaaaaatggcgtttaatagtcaatgtcatgctttatggggtggtggagtactatgtgactgtgtgtggacttggagaagactagagagtatgattatcaacatatagaccctgaaaatgaaaatgaaaatgaaaatgatgtttttacactttaaaatcgtcaagaaacaacaatcctttttagcaatagtatttacacgcgctagttgcacgaactttaatgcaaatagtataaatttacggtcaaagttttcatactttagacacatactctctccgtcccttaatactcgcaccgctttccttttcgggccgtcccttaatacttgcaccgcttctataaatggaaatctatttctcacaattacctactaacccacctacactcatcgtccctacaaaaaatcatttaaaaattcacaccccacactcaccactcctcacccattacacatttcctactaactatattaaaaaaatatcccactataaactaacactcattaaattaataagtcaattcaaatatcttaaactccgcaccggtcaaatcggtgcgagtattaagggacggagggagtattatagagtgtaaataactttcatgaatggagggagtaaaaaattgttttacttggctaaaatacttttgttcttattggcagataaacatgagtccattattggccaacttgaacatatacctccaaacaataatcaataatgtcgattatgaagtttgtgaatgcaatttattatcactttcattgcaagttgtcatctgtgctgagtgttgatttataaaaaggactacttgattaacacatacaatattactccacctttctccagacaacctttcttttctgcttttatcttgttttctcatcttaattcatctcttcatctttctgaaaaacccaaccca

SEQ ID NO: 6 - DNA, 3543 bp, Spinacia oleracea
atggctgaaatcggatactcggtttgttcaaaacttattgaagtgatgggcagtaagatcattaaagagatttgcgacatgtggggttacaattctcatcttgaagacctcaacaaatctgtcttgacgatcaaggatgtgctcttggatgctgaggcgaagcgggatctttcccgtgaacaacagagttacattgcagaacttaaggatgttgtttacgatgctgatgatttgttcgatgagttcctcactcttgctgagctcaaacagattgatggcaacaacaagggtggtggtaaattctccaaaaaggtacgtcgtttcttttcttctaataaggagaagatgggtcaagcttacaagatgtctcatatggttaaagaaattaagaagcagttgggtgaaattgttgataggtataccaaatttgggtttattgttgattataaacctattattaggagaagggaggaaacatgttcttattttgtaggtgccaaggagattgttgggagggataaggataaagatgttatcataggcatgttgctagatcatgataacgattgtagtttcttggctgttgtgggggttggaggggtgggaaaaactactcttgcccaacttgtgtataatgatgaaagagtcaaaagtgagttccaagatttgaggtattgggtttgtgtctctgatcaagatgggggacaatttgatgacaaaagaattctttgtaagattatagagttagttacgggccagattcctccgagtaacgagagcatggaatcggtgcgtaagaaatttcaagaggaattaggaggaaagaagtacttccttgttcttgatgatgtatggaacgaggatcgccagaagtggcttcatctagaaaatttcttgaaattgggtcaagggggaagcaagattgtggtaaccacacgttcagagaagacggcaaatgttatagggaaaagacaagactataaactagaatgtttgtcagcagaggattcatggcgcttatttgaaatgtcagcttttgacgaagggcatggccaggaaaactatgacgaattagtgacgattggcaagaagattgttgaaaaatgttataacaatccacttgctataacagtggtaggaagccttctttttggacaagagataaataagtggcggtcgtttgaaagcagtggattagcccaaattgccaatggtgataatcagattttcccgatattaaagctcagttaccacaatcttccacactccttgaagagctgctttagctattgtgcagtgtttcccaaagattatgaaataaagaaggagatgttgattgatctttggatagcacaaggatacattataccgttggatggaggtcaaagtatagaagatgctgccgaggaacattttgtaattttgttaagaagatgtttctttcaagatgtaaagaaggattctcttggtaatgttgattatgttaaaatccacgacttaatgcacgatgtcgctcaagaagtggggaaggaggaaatctgtgtagtgacttcaggtacaaagaagttggctgataaaatccgtcacgtgggttgtgttgtcgatagagatccagaaatagtctttttatgtagcaataagattcgttcgtatattagcggtcgctgcataaagaatccggtggattcacaaatagacaactggatgtgccttagggtgttggacttgtcagattcatgtgttaaagatttgtctgattcaataggtaagctgctgcacttaaggtatcttaacctctcttctaatataaagttggagataatccctgatgcaattacaagactgcataacttgcagacactacttttagaagattgcagaagtttaaaggagttgccaaaagatttttgcaaattggtcaaactgaggcacttggaattacagggttgtcatgatttgattggtatgtcatttggaatggataagctaactagtcttagaatactaccaaacattgtggtgggtaggaaggaacaaagtgttgatgatgagctgaaagccctaaaaggcctcaccgagataaaaggctccattgatatcacaatctattcaaaatatagaagagttgaaggcatgaatggcacaggaggaggagctgggtatttgaagagcatgaaacatctcacgggggttaatattacatttgatgaaggtggatgtgttaaccctgaagctgtgtatttgaagagcatgaaacatctcacgagggttattattatatttgattataaaggtggatgtgttaaccctgaagctgtgttggcaaccctagagccaccttcaaatatcaagaggttagagatgtggcattacagtggtacaacaattccagtatggggaagagcagagattaattgggcaatctccctctcacatcttgtcgacatcacgcttgaagattgttacaatttgcaggagatgccagtgctgagtaaactgcctcatttgaaatcactggaacttacagagttggataacttagagtacatggagagtagaagcagcagcagtagcagtgacacagaagcagcaacaccagaattaccaacattcttcccttcccttgaaaaacttacactttggcgtctggacaagttgaagggttttgggaacaggagatcgagtagttttccccgcctctctaaattggaaatctggaaatgtccagatctaacgtcatttccttcttgtccaagccttgaagagttggaattgaaagaaaacaatgaagcgttgcaaataatagtaaaaataacaacaacaagaggtaaagaagaaaaagaagaagacaagaatgctggtgttggaaattcacaagatgatgacaatgtcaaattatggaaggtggaaatagacaatctgggttatctcaaatcactgcccacaaattgtctgactcacctcgaccttacaataagtgattccaaggagggggagggtgaatgggaagttggggatgcatttcagaagtgtgtatcttctttgagaagcctcaccataatcggaaatcacggaataaataaagtgaagagactgtctggaagaacagggttggagcatttcactctgttggaatcactcaaactttcagatatagaagaccaggaagatgagggcgaagacaacatcatattctggaaatcctttcctcaaaacctccgcagtttgagaattaaagactctgacaaaatgacaagtttgcccatggggatgcagtacttaacctccctccaaaccctctatctacaccattgttatgaattgaattcccttccagaatggataagcagcttatcatctcttcaatacctgcgcatatactactgtccagccctgaaatcactaccagaagcaatgcggaacctcacctcccttcagacacttgggatatcggattgtccagacctagttaaaagatgcagaaaacccaacggcaaggactatcccaaaattcaacacatccccaaaattattatatggtag

SEQ ID NO: 7 - protein, 1180 aa, Spinacia oleracea
MAEIGYSVCSKLIEVMGSKIIKEICDMWGYNSHLEDLNKSVLTIKDVLLDAEAKRDLSREQQSYIAELKDVVYDADDLFDEFLTLAELKQIDGNNKGGGKFSKKVRRFFSSNKEKMGQAYKMSHMVKEIKKQLGEIVDRYTKFGFIVDYKPIIRRREETCSYFVGAKEIVGRDKDKDVIIGMLLDHDNDCSFLAVVGVGGVGKTTLAQLVYNDERVKSEFQDLRYWVCVSDQDGGQFDDKRILCKIIELVTGQIPPSNESMESVRKKFQEELGGKKYFLVLDDVWNEDRQKWLHLENFLKLGQGGSKIVVTTRSEKTANVIGKRQDYKLECLSAEDSWRLFEMSAFDEGHGQENYDELVTIGKKIVEKCYNNPLAITVVGSLLFGQEINKWRSFESSGLAQIANGDNQIFPILKLSYHNLPHSLKSCFSYCAVFPKDYEIKKEMLIDLWIAQGYIIPLDGGQSIEDAAEEHFVILLRRCFFQDVKKDSLGNVDYVKIHDLMHDVAQEVGKEEICVVTSGTKKLADKIRHVGCVVDRDPEIVFLCSNKIRSYISGRCIKNPVDSQIDNWMCLRVLDLSDSCVKDLSDSIGKLLHLRYLNLSSNIKLEIIPDAITRLHNLQTLLLEDCRSLKELPKDFCKLVKLRHLELQGCHDLIGMSFGMDKLTSLRILPNIVVGRKEQSVDDELKALKGLTEIKGSIDITIYSKYRRVEGMNGTGGGAGYLKSMKHLTGVNITFDEGGCVNPEAVYLKSMKHLTRVIIIFDYKGGCVNPEAVLATLEPPSNIKRLEMWHYSGTTIPVWGRAEINWAISLSHLVDITLEDCYNLQEMPVLSKLPHLKSLELTELDNLEYMESRSSSSSSDTEAATPELPTFFPSLEKLTLWRLDKLKGFGNRRSSSFPRLSKLEIWKCPDLTSFPSCPSLEELELKENNEALQIIVKITTTRGKEEKEEDKNAGVGNSQDDDNVKLWKVEIDNLGYLKSLPTNCLTHLDLTISDSKEGEGEWEVGDAFQKCVSSLRSLTIIGNHGINKVKRLSGRTGLEHFTLLESLKLSDIEDQEDEGEDNIIFWKSFPQNLRSLRIKDSDKMTSLPMGMQYLTSLQTLYLHHCYELNSLPEWISSLSSLQYLRIYYCPALKSLPEAMRNLTSLQTLGISDCPDLVKRCRKPNGKDYPKIQHIPKIIIW

SEQ ID NO: 8 - DNA, 6953 bp, Spinacia oleracea
atggccgaaatcggatactcggtttgtgcgaaactcatcgaagtgattggcagtgagctgatcaaagagatttgtgacacatggggttacaaatctcttcttgaggacctcaacaaaactgtattgacggtcaggaacgttctcattcaagccggggtgatgcgggagcttactagtgaacaacaaggtttcattgcagaccttaaagatgttgtttatgatgctgatgacttgttcgacaagttactcactcgtgctgagcgaaaacagattgatggaaacgaaatctctgaaaaggtacgtcgtttcttttcctctagtaacaagatcggtcaagcttactacatgtctcgtaaggttaaggaaattaagaagcagttggatgaaattgttgataggcatacaaaatttgggtttagtgccgagtttatacctgtttgtagggaaagggggaacgagagggaaacacgttcatatatagatgtcaagaatattcttgggagggataaagataagaatgatatcatagataggttgcttaatcgtaatggtaatgaagcttgtagtttcctgaccatagtgggagcgggaggattgggaaaaactgctcttgcacaacttgtgttcaatgatgaaagggtcaaaattgagttccatgatttgaggtattgggtttgtgtctctgatcaagatgggggccaatttgatgtgaaagaaatcctttgtaagattttagaggtggttactaaggagaaagttgataatagttccacattggaattggtacaaagccaatttcaagagaagttaagaggaaagaagtacttccttgttcttgatgatgtatggaacgaagatcgtgagaagtggcttcctttggaagagttgttaatgttgggtcaagggggaagcaaggttgtagtgaccgcacgttcagagaagacagcaaatgtcatagggaaaagacatttttatacactggaatgtttgtcaccagattattcatggagcttatttgaaatgtcggcttttcagaaagggcatgagcaggaaaaccatcacgaactagttgatattgggaaaaagattgttgaaaaatgttataacaatccacttgctataacggtggtaggaagtcttctttatggagaggagataagtaagtggcggtcatttgaaatgagtgagttggccaaaattggcaatggggataataagattttgccgatattaaagctcagttaccataatcttataccctcgttgaagagttgcttcagttattgtgcagtgtttcccaaggatcatgaaataaagaaggagatgttgattgatctttggatagcacaaggatacgttgtggcacttgatggaggtcaaagtatagaagatgctgccgaagaacattttgtaattttgttacggagatgtttctttcaagatgtaaagaaggatgaatatggtgatgttgattctgttaaaatccacgacttgatgcacgatgtcgcccaagaagtggggagggaggaaatatgtgtagtgaatgataatacaaagaacttgggtgataaaatccgtcatgtacatggtgatgtcaatagatatgcacaaagagtctctctgtgtagccatagccataagattcgttcgtatattggtggtgattgtgaaaaacgttgtgtggatacactaatagacaagtggatgtgtcttaggatgttggacttgtcatggtcggatgttaaaaatttgcctaattcaataggtaaattgttgcacttgaggtatcttaacctgtcagataatagaaatctaaagatacttcctgatgcaattacaagactgcataatttgcagacactacttttagaagattgcagaagtttaaaggagttgccaaaagatttttgcaaattggtcaaactgaggcacttggaattacagggttgtcatgatttgattggtatgccatttggaatggataagctaactagtcttagaatactaccaaacattgtggtgggtaggaaggaacaaagtgatgatgagctgaaagccctaaaaggcctcaccgagataaaaggctccatttctatcagaatctattcaaagtatagaatagttgaaggcatgaatgacacaggaggagctgcttatttgaagagcatgaaacatctcagggagattgatattacatttttgggtgaatgtgttggccctgaagctgtattggaaaccttagagccaccttcaaatatcaagagcttatatatatataattacagtggtacaacaattccagtatggggaagagcagagattaattgggcaatctccctctcacatctcgtcgacatccagcttagttgttgtagtaatttgcaggagatgccagtgctgagtaaactgcctcatttgaaatcgctgaaacttggatggttggataacttagagtacatggagagtagcagtagcagtgacacagaagcagcaacaccagaattaccaacattcttcccttcccttgaaaaacttactttacagcatctggaaaagttgaagggttttgggaacaggagatcgagtagttttccccgcctctctgaattggaaatcaagaaatgcccagatctaacgtcatttccttcttgtccaagccttgagaagttggaattgaaagaaagcaatgaagcattgcaaataatagtaaaaataacaacaagaggtaaagaaaaagaagagaacaataatgctggtgttagaaattcacaagatgatgacaaagtcaaattacggaagatggtgatagacaatctgggttatctcacgggggttgatattagatttgatgatagagaaggtggatttgttaaccctgaagctgtgttggcaaccctagagccaccttcaaatatcaagagcttatctatacatcgttttgatggtaaaacacttccagtatggggaagagcagagattaattgggcaatctccctctcacatcttgtcgacatccagctttggcattgtcgtaatttgcaggagatgccagtgctgagtaaactgcctcatttgaaatcactggaactttataatttgattagtttagagtacatggagagcacaagcagaagcagtagcagtgacacagaagcagcaacaccagaattaccaacattcttcccttcccttgaaaaacttacactttggggtctggaaaagttgaagggtttggggaacaggagatcgagtagttttccccgcctctctgaattgaaaatcatggaatgcccagatctaacgtggtttcctccctgtccaagccttgaaaaacttacactttggcgtctggacaagttgaagggttttgggaaccggagatcgagtacttttccccgcctctctgaattggaaatcaagaaatgcccagatctaacgtcatttccttcttgtccaagccttgagaagttggaattgaaagaaagcaatgaagcattgcaaataatagtaaaaataacaacaagaggtaaagaaaaagaagagaacaataatgctggtgttagaaattcacaagatgatgacaaagtcaaattacggaagatggtgatagacaatctgggttatctcaaatcactgcccacaaattgtcttactcacctcgaccttacaataagtgattccaaggagggggagggtgaatgggaagttggggatgcatttcagaagtgtgtatcttctttgagaagcctcaccataatcggaaatcacggaataaataaagtgaagagactgtctggaagaacagggttggagcatttcactctgttggaatcactcaaactttcagatatagaagaccaggaagatgagggcgaagacaacatcatattctggaaatcctttcctcaaaacctccgcagtttggaaattgaaaactcttacaaaatgacaagtttgcccatggggatgcagtacttaacctccctccaaaccctctatctacaccattgttatgaattgaattcccttccagaatggataagcagcttatcatctcttcaatacctgcgcatatactactgtccagccctgaaatcactaccagaagcaatgcggaacctcacctcccttcagacacttgggatatcggattgtccagacctagttaaaagatgcagaaaacccaacggcaaggactatcccaaaattcaacacatccccaaaattgtaagtcattgcagaaagtaatttattcatttatatttattttatgcttagaatgatatacaccgtcgtcctttggtttcaaatcttgaatttggtttttgttttctttctttgtttctttattcaacaccagcccatttatgattgattcattaaaaaaaggatggagttttatggatttgaagaagacaacgaattgagattcctggggttttctttttgttggggttggatttcatgtatatgttgctgattaaatacgagactgatgatgatgatgtgtttatgggttttaaatcagattaaatatatgggaaatgtaagttagttggggatgcacataaggtgtttgatgaaatgtctatgagaaatgttgtttcttggacttagaatgatatacactgtcgtcctttggtttccaatctggaatttggtttttgttttcttagtttgtttctttattccacactagcccattttttttaaactacctgcaactactgaatttcatttaccctgtatctcagattatatggtagtaattctcatttactcaacactagcttgatcctgaacgcagccaaccttcaggttagaatccgccttactcatccttttgtcatgaattgttttaagttgttttgcttgcttgtgtaatcataattcatagtatacgattcatcattcactatgtctataggcaagatattggaattgttcacgatttcctgaagtttctttgtttttgttgataccaccatattgcagcttatagtgactaagttaatgaatgtttccaaaaattagtcatataaattcttcttctctctctattacataaaccctttttctctttctaacttatcatgttcatgtctaaaacgtatacatgctcacatcattgttcgtttcagctgacttacttatgtaagagagctatctagttaacaactcttgtaactttttatttgctagtcagaacatggattggtgcaagcatgggaatatgctaacactctaccaaatcgattggagtttggacttagtttcaccagaagccatacccggacacttactggggactgtcaacaaagccgcattgtgatgtacttggatgtttcacgtgcctgaggtgcgagttacttggaagggaagcggtttatttaattgttttcccaagtagattttgcttacaagcttttacttttcacttgaaagggtttttcttgttttaagcttttcgaattagagttttcggttgcattaagagtagtcgtattagtcttttacctaaggaagactcttttttgtaattttcagactatgcaattcaagttttcgagtgttttcttgcttgtgtgattgtgagttggtgaattcgtctttcatacattttgagattatcagaagcttttatgctccaccggtagtctagtaccttttctgttactgtgcagggaagtaatctggtaccttctatatatatggaaaaacatacattatacattatgcaaaattcttacaggttagttacttcctggaacttcatttacacttagttttttttgttccattccctcggaatcaagtcattccctctgagaaatatgtaatgaacttctgtatgttgctgtttggttcctgttttaatcttcaattttcttgtatagttacagctgcatttacaatgaagtttaagcagacactctctttatatagtgcctctttctggagcaccgtagagctgtctgtggttgatcaccatctgctgccgagagattcagcaatcgcgtgtttgatcaggtaaaagtttttatgtcaatgtgtttttttttccgtttgatcaatttatgtctgtattcagattcttatcttcttacagtagcataacacattgtttctttcatttatgtaatctgtttcaagattacagagatgtatgcttcagtcgacattgatgataacttaagatggcattcctacaacagttgcaggcgcattctaactccggcaattctagttaggcaagaggagcattgccaatacctgccacctctgggatttactataccagggttgaagtttatggaagacaccagctatgcacaagccttcaaggggtcatcctacataacaagttgaaccaaccaattgcttgttggttcagtggtaattggagctgaatttggtagggatgacccgtgttcgatccccacaacaacaattgggaggggactggaacctatccacacagaactcgccctgaatccggattagccctaagggtgaacggggtgctaacaccaaaaaaaaaaacataacaagttgaaccaaacatactttgtttgaattgaagatttagtgatttcatttgatcgattgagatgtcttattataagcgtatatgctcttggatttggccacttaggtgttgtttgacaattggtcattaactcgcttttatattttcttttctcttaggaaaggtgatcctgagaatttatattggaacactttttttttctcactagctttaaaaaagtgttctgtgttacctgcaattcaatttgattatttttcacatagttttacctgaaaaagtgttacctgaaaaagtgttacctgaaaatcaactgacataagtttttgtttggatccaattaaggacactagataaatcggaataaataatcaaccaattaagtacttcataattaaatatgaag

SEQ ID NO: 9 - DNA, 2000 bp, Spinacia oleracea
tttgaagttaggcttaacttgctcaccaattcttaaatagactcgacttacactgaatttattgtgtactatgtctagaaagtaaggtcaacaactttcttctaaattattttggcatgtttattagggttattatgaaaaacatatcaaattggtgttgttagttaggcttgaataatatgattttaagtcacgagacttttataaattaggtaatttgatttaaaaaattgttacatatctaagaaaatggatgttaaatttatcagtcaatgtataaacaataaaagtcaatatgtatgtaaaagggttgctagataaaatctttggttttttggtccacaactccacactaagaggaactccaatgcttagttacaaggtggtgtagttaaaaagtaactccaatagttaactacacggtattatagttaaatttgccaactcaaatttctaactacaatatatttaagctacaaagtttctcattggctgactacaatacgttgtagcgccttataatattttattcaatatacaattttatttattttacctttttaacaatttttttttgatctacctgctgtcctgttcatatgagctacactaatttgatagctgcttacgcaattcttatatcaacggttggctacttgttcaaatatttttatttttttacgagtaagtcattttatgatcattgaagtggctctattattattatcatgcaccgattaacgcaagaataattaactcggtacgaattagtttcaaaataaaatccctcaaaaaaaaaagtttcaaaataaaattaacagaaaaccaaccttctccggtttactgttgttagagcatggaattttccagtaatcgcagaccccaaattatcttccagttgaatcaatccttgatttttggatttgccagaaaactccttgaattttagggttcatatttgatccgtaattgggaaaattttcagcaattgatcttccaaatcagccctacttgtttccagactgcaaatgaaaggtgcgaactttatactgcattttggttttccattagtgtaatttattaagatgaactgcattttgcaattgttttattcgactactcatttttaaatcaaattgcttaattgctagttagttttcttatcatattgccaaaaaaaattatttttgtttaattggtgaaaaagggtaaattatacctagtgtacaagattttcttgcacaccaccgttaatttgttgacacatcatcaaacgtactgaaaaatgagaatgaaagacaataaatatgtcattttaaccaatagaaaaacatgatgtagtaagatccttaattgatagataaataattaaatatcagtccattagttgaatattcaatgaaaatgtatggtccaaaaatggcgtttaatagtcaatgtcatgctttatggggtggtggagtactatgtgactgtgtgtggacttggagaagactagagagtatgattatcaacctatggaccctcaaaatgaaaatgaaaatgatgtttacacgtgctatttgcacggacttcaatgcaaatagtataaatttacggtcaaagttttcattctaaagcgtaaataactttcatgattggaggacggtagtataagtataacgttatagcctaccattttcttatcatattcacataaatttgttgctgaaatttgttttacttggctaaaatacttttgttcttattggcagataaacatcagtacgtccattattggccaacttgctgagtccattattggccaacttgaacatatacctccaaacaataatcaataatgtcgattatgaagtttgtgaatgcaatttattatcactttcatttataaaatgactacttgattaacacatacaatattacctttctccaaacaccctttcaattctgcttaatcttgttttctcatcatctcttcatctttctgaaaacacaaccca

SEQ ID NO: 10 - DNA, 4239 bp, Spinacia oleracea
atggccgaaatcggatactcggtttgtgcgaaactcatcgaagtgattggcagtgagctgatcaaagagatttgtgacacatggggttacaaatctcttcttgaggacctcaacaaaactgtattgacggtcaggaacgttctcattcaagccggggtgatgcgggagcttactagtgaacaacaaggtttcattgcagaccttaaagatgttgtttatgatgctgatgacttgttcgacaagttactcactcgtgctgagcgaaaacagattgatggaaacgaaatctctgaaaaggtacgtcgtttcttttcctctagtaacaagatcggtcaagcttactacatgtctcgtaaggttaaggaaattaagaagcagttggatgaaattgttgataggcatacaaaatttgggtttagtgccgagtttatacctgtttgtagggaaagggggaacgagagggaaacacgttcatatatagatgtcaagaatattcttgggagggataaagataagaatgatatcatagataggttgcttaatcgtaatggtaatgaagcttgtagtttcctgaccatagtgggagcgggaggattgggaaaaactgctcttgcacaacttgtgttcaatgatgaaagggtcaaaattgagttccatgatttgaggtattgggtttgtgtctctgatcaagatgggggccaatttgatgtgaaagaaatcctttgtaagattttagaggtggttactaaggagaaagttgataatagttccacattggaattggtacaaagccaatttcaagagaagttaagaggaaagaagtacttccttgttcttgatgatgtatggaacgaagatcgtgagaagtggcttcctttggaagagttgttaatgttgggtcaagggggaagcaaggttgtagtgaccgcacgttcagagaagacagcaaatgtcatagggaaaagacatttttatacactggaatgtttgtcaccagattattcatggagcttatttgaaatgtcggcttttcagaaagggcatgagcaggaaaaccatcacgaactagttgatattgggaaaaagattgttgaaaaatgttataacaatccacttgctataacggtggtaggaagtcttctttatggagaggagataagtaagtggcggtcatttgaaatgagtgagttggccaaaattggcaatggggataataagattttgccgatattaaagctcagttaccataatcttataccctcgttgaagagttgcttcagttattgtgcagtgtttcccaaggatcatgaaataaagaaggagatgttgattgatctttggatagcacaaggatacgttgtggcacttgatggaggtcaaagtatagaagatgctgccgaagaacattttgtaattttgttacggagatgtttctttcaagatgtaaagaaggatgaatatggtgatgttgattctgttaaaatccacgacttgatgcacgatgtcgcccaagaagtggggagggaggaaatatgtgtagtgaatgataatacaaagaacttgggtgataaaatccgtcatgtacatggtgatgtcaatagatatgcacaaagagtctctctgtgtagccatagccataagattcgttcgtatattggtggtgattgtgaaaaacgttgtgtggatacactaatagacaagtggatgtgtcttaggatgttggacttgtcatggtcggatgttaaaaatttgcctaattcaataggtaaattgttgcacttgaggtatcttaacctgtcagataatagaaatctaaagatacttcctgatgcaattacaagactgcataatttgcagacactacttttagaagattgcagaagtttaaaggagttgccaaaagatttttgcaaattggtcaaactgaggcacttggaattacagggttgtcatgatttgattggtatgccatttggaatggataagctaactagtcttagaatactaccaaacattgtggtgggtaggaaggaacaaagtgatgatgagctgaaagccctaaaaggcctcaccgagataaaaggctccatttctatcagaatctattcaaagtatagaatagttgaaggcatgaatgacacaggaggagctgcttatttgaagagcatgaaacatctcagggagattgatattacatttttgggtgaatgtgttggccctgaagctgtattggaaaccttagagccaccttcaaatatcaagagcttatatatatataattacagtggtacaacaattccagtatggggaagagcagagattaattgggcaatctccctctcacatctcgtcgacatccagcttagttgttgtagtaatttgcaggagatgccagtgctgagtaaactgcctcatttgaaatcgctgaaacttggatggttggataacttagagtacatggagagtagcagtagcagtgacacagaagcagcaacaccagaattaccaacattcttcccttcccttgaaaaacttactttacagcatctggaaaagttgaagggttttgggaacaggagatcgagtagttttccccgcctctctgaattggaaatcaagaaatgcccagatctaacgtcatttccttcttgtccaagccttgagaagttggaattgaaagaaagcaatgaagcattgcaaataatagtaaaaataacaacaagaggtaaagaaaaagaagagaacaataatgctggtgttagaaattcacaagatgatgacaaagtcaaattacggaagatggtgatagacaatctgggttatctcacgggggttgatattagatttgatgatagagaaggtggatttgttaaccctgaagctgtgttggcaaccctagagccaccttcaaatatcaagagcttatctatacatcgttttgatggtaaaacacttccagtatggggaagagcagagattaattgggcaatctccctctcacatcttgtcgacatccagctttggcattgtcgtaatttgcaggagatgccagtgctgagtaaactgcctcatttgaaatcactggaactttataatttgattagtttagagtacatggagagcacaagcagaagcagtagcagtgacacagaagcagcaacaccagaattaccaacattcttcccttcccttgaaaaacttacactttggggtctggaaaagttgaagggtttggggaacaggagatcgagtagttttccccgcctctctgaattgaaaatcatggaatgcccagatctaacgtggtttcctccctgtccaagccttgaaaaacttacactttggcgtctggacaagttgaagggttttgggaaccggagatcgagtacttttccccgcctctctgaattggaaatcaagaaatgcccagatctaacgtcatttccttcttgtccaagccttgagaagttggaattgaaagaaagcaatgaagcattgcaaataatagtaaaaataacaacaagaggtaaagaaaaagaagagaacaataatgctggtgttagaaattcacaagatgatgacaaagtcaaattacggaagatggtgatagacaatctgggttatctcaaatcactgcccacaaattgtcttactcacctcgaccttacaataagtgattccaaggagggggagggtgaatgggaagttggggatgcatttcagaagtgtgtatcttctttgagaagcctcaccataatcggaaatcacggaataaataaagtgaagagactgtctggaagaacagggttggagcatttcactctgttggaatcactcaaactttcagatatagaagaccaggaagatgagggcgaagacaacatcatattctggaaatcctttcctcaaaacctccgcagtttggaaattgaaaactcttacaaaatgacaagtttgcccatggggatgcagtacttaacctccctccaaaccctctatctacaccattgttatgaattgaattcccttccagaatggataagcagcttatcatctcttcaatacctgcgcatatactactgtccagccctgaaatcactaccagaagcaatgcggaacctcacctcccttcagacacttgggatatcggattgtccagacctagttaaaagatgcagaaaacccaacggcaaggactatcccaaaattcaacacatccccaaaattattatatggtag

SEQ ID NO: 11 - protein, 1412 aa, Spinacia oleracea
MAEIGYSVCAKLIEVIGSELIKEICDTWGYKSLLEDLNKTVLTVRNVLIQAGVMRELTSEQQGFIADLKDVVYDADDLFDKLLTRAERKQIDGNEISEKVRRFFSSSNKIGQAYYMSRKVKEIKKQLDEIVDRHTKFGFSAEFIPVCRERGNERETRSYIDVKNILGRDKDKNDIIDRLLNRNGNEACSFLTIVGAGGLGKTALAQLVFNDERVKIEFHDLRYWVCVSDQDGGQFDVKEILCKILEVVTKEKVDNSSTLELVQSQFQEKLRGKKYFLVLDDVWNEDREKWLPLEELLMLGQGGSKVVVTARSEKTANVIGKRHFYTLECLSPDYSWSLFEMSAFQKGHEQENHHELVDIGKKIVEKCYNNPLAITVVGSLLYGEEISKWRSFEMSELAKIGNGDNKILPILKLSYHNLIPSLKSCFSYCAVFPKDHEIKKEMLIDLWIAQGYVVALDGGQSIEDAAEEHFVILLRRCFFQDVKKDEYGDVDSVKIHDLMHDVAQEVGREEICVVNDNTKNLGDKIRHVHGDVNRYAQRVSLCSHSHKIRSYIGGDCEKRCVDTLIDKWMCLRMLDLSWSDVKNLPNSIGKLLHLRYLNLSDNRNLKILPDAITRLHNLQTLLLEDCRSLKELPKDFCKLVKLRHLELQGCHDLIGMPFGMDKLTSLRILPNIVVGRKEQSDDELKALKGLTEIKGSISIRIYSKYRIVEGMNDTGGAAYLKSMKHLREIDITFLGECVGPEAVLETLEPPSNIKSLYIYNYSGTTIPVWGRAEINWAISLSHLVDIQLSCCSNLQEMPVLSKLPHLKSLKLGWLDNLEYMESSSSSDTEAATPELPTFFPSLEKLTLQHLEKLKGFGNRRSSSFPRLSELEIKKCPDLTSFPSCPSLEKLELKESNEALQIIVKITTRGKEKEENNNAGVRNSQDDDKVKLRKMVIDNLGYLTGVDIRFDDREGGFVNPEAVLATLEPPSNIKSLSIHRFDGKTLPVWGRAEINWAISLSHLVDIQLWHCRNLQEMPVLSKLPHLKSLELYNLISLEYMESTSRSSSSDTEAATPELPTFFPSLEKLTLWGLEKLKGLGNRRSSSFPRLSELKIMECPDLTWFPPCPSLEKLTLWRLDKLKGFGNRRSSTFPRLSELEIKKCPDLTSFPSCPSLEKLELKESNEALQIIVKITTRGKEKEENNNAGVRNSQDDDKVKLRKMVIDNLGYLKSLPTNCLTHLDLTISDSKEGEGEWEVGDAFQKCVSSLRSLTIIGNHGINKVKRLSGRTGLEHFTLLESLKLSDIEDQEDEGEDNIIFWKSFPQNLRSLEIENSYKMTSLPMGMQYLTSLQTLYLHHCYELNSLPEWISSLSSLQYLRIYYCPALKSLPEAMRNLTSLQTLGISDCPDLVKRCRKPNGKDYPKIQHIPKIIIW

SEQ ID NO: 12 - DNA, 6248 bp, Spinacia oleracea
atggccgaaatcggatactcggtttgtgcgaaactcatcgaagtgattggcagtgagctgatcaaagagatttgtgacacatggggttacaaatctcttcttgaggacctcaacaaaactgtattgacggtcaggaacgttctcattcaagccggggtgatgcgggagcttactagtgaacaacaaggtttcattgcagaccttaaagatgttgtttatgatgctgatgacttgttcgacaagttactcactcgtgctgagcgaaaacagattgatggaaacgaaatctctgaaaaggtacgtcgtttcttttcctctagtaacaagatcggtcaagcttactacatgtctcgtaaggttaaggaaattaagaagcagttggatgaaattgttgataggcatacaaaatttgggtttagtgctgagtttatacctgtttgtaggggaaggggaaacgagagggaaacacgttcatatatagatgtcaagaatattcttgggagggataaagataagaatgatatcatagataggttgcttaatcgtaatggtaatgaagcttgtagtttcctgaccatagtgggagcgggaggattgggaaaaactgctcttgcacaacttgtgttcaatgatgaaagggtcaaaattgagttccatgatttgaggtattgggtttgtgtctctgatcaagatgggggccaatttgatgtgaaagaaatcctttgtaagattttagaggtggttactaaggagaaagttgataatagttccacattggaattggtacaaagccaatttcaagagaagttaagaggaaagaagtacttccttgttcttgatgatgtatggaacgaagatcgtgagaagtggcttcctttggaagagttgttaatgttgggtcaagggggaagcaaggttgtagtgaccacacgttcagagaagacagcaaatgtcatagggaaaagacatttttatacactggaatgtttgtcgccagattattcatggagcttatttgaaatgtcggcttttcagaaagggcatgagcaggaaaaccatgacgaactagttgatattgggaaaaagattgttgaaaaatgttataacaatccacttgctataacggtggtaggaagtcttctttatggagaggagataagtaagtggcggtcatttgaaatgagtgagttggccaaaattggcaatggggataataagattttgtcgatattgaagctcagttactacaatcttgcaaactctttgaagagttgttttagttattgtgcagtgtttcccaaggatcatgaaataaagaaggagatgttgattgaactttggatggcacaaggatatgttgtgccgttggatggaggtcaaagtatagaagatgctgccgaggaacattttgtaattttgttacgaaggtgtttctttcaagatgtaaagaaggataaatatggtgatgttgattctgttaaaatccacgacttgatgcacgatgtcgcccaagaagtggggagggaggaaatatgtgtagtgaatgataatacaaagaacttgggtgataaaatccgtcatgtacatggtgatgtcaatagatatgcacaaagagtctctctgtgtagccataagattcgttcgtatattggtggtaaatgtgaaaaacgttgggtggatacactaatagacaagtggatgtgtcttaggatgttggacttgtcaaggtcggatgttaaaaatttgcctaattcaataggtaaattgttgcacttgaggtgtcttaacctgtcttataatgatctgttgatactccctgatgcaattacaagactgcataatttgcagacactgcttttaaaagattgcggaagtttaatggagttgccaaaagatttttgcaaattggtcaaactgagacacttggatttaagggattgtgatgatttgattggtatgccattgggaatggataggctaactagtcttagagtactgccattctttgtggtgggtaggaaggaacaaagtgttgacgatgagctgaaagccctaaaaggcctcaccgagataaaaggctccattgatatcacaatctattcaaagtatagaatagttgaaggcatgaatgacacaggagctgggtatttgaagagcatgaaacatctcagggagattggtattacatttgatggtggatgtgttaaccctgaagctgtgttggaaaccctagagccaccttcaaatatcaagagcttatctatagataattacgatggtacaacaattccagtatggggaagagcagagattaattgggcaatctccctctcacatcttgtcgacatttggttttgtggttgtagtaatttgcaggagatgccagtgctgagtaaactgcctcatttgaaatcactgtatctttttatgttttgtaagttagagtacatggagagtagaagcagcagcagtagcagtgacacagaagcagcaacaccagaattaccaacattcttcccttcccttgaaaaacttacactttggtatctggaaaagttgaagggtttggggaacaggagatcgagtagttttccccgcctctctaaattggaaatcaatgaatgcccagatctaacgtggtttcctccttgtccaagccttgaaacgttgaaattggtaaaaaacaatgaagcgttgcaaataatagtaaaaataacaacaacaagaggtaaagaagaaaaagaagaagacaagaatgctggtgttggaaattcacaagatgatgacaatgtcaaattatggaaggtggaaatagacaatcaatgttatctcaaatcactgcccacaaattgtcttactcacctcaacataaaagtaagagattccgaaggggaggagattgaattggaagttggggaggcatttcagaagtgtgcatcttctttgagaagcctcatcataatcggaaatcacggaataaataaagtgatgagactgtctggaagaacagggttggagcatttcactctgttggactcactcaaattttcatatatagaagaccaggaagatgagggcgaagacaacatcatattctggaaatcctttcctcaaaacctccgcagtttggaaattaaaggctcttgcaaaatgacaagtttgcccatggggatgcagtacttaacctccctccaaaccctccatctatcatattgtgatgaattgaattcccttccagaatggataagcagcttatcatctcttcaatccctgttcatatacaattgtccagccctgaaatcactaccagaagcaatgaagaacctcacctcccttcagagacttgagatacagcattgtccagacctagctgaaagatgcagaaaacccaacggggaggactatcccaaaattcaacacatccccaaaattgtaagtcattgcagaaagtaatttattcatttatatttattttatgcttagaatgatatacgcagtcgtcctttggtttccaatcttgaatttggtttttgttttctttctttgtttctttattcaacaccagtccatttatgattgattcattaaaaaaaggatggagttttatggatttgaagaagacaacgaattgagattcctggggttttttttttcgttggggttggttttcatgtatatgttgctgattaaataccagactgatgatgatgatgtgtttatgggttttaaatcagattaaatatatgggaaatgtaagttaattggggatgcacataaggtgtttgatgaaatgtctatgagaaatgttgtttcttggacttagaatgatatacactgtcgtcctttggtttccaatcttacatttggtttgtgttttcttagtttgtttctttaatcaacaccagcccattttttttaaactacctgcaactactaattttcatttaccctgtatctcaggaaatatggtagtaattctcatttactcaacactagcttgatcctgaacgcagccaaccttcaggttagaatccgccttactcatccttttgtcatgcattgttttaagttgttttgcttgcttgtgtaatcataattcatagtatacgattcatcattcactatgtctacaggcaagatattggaattgttcacgattccctgaagtttctttgtttttgttgataccaccatattgcagcttatagtgactaagttaatgaatgtttccaaaaaattagtcatataaattcttcttctctctctattacataaactctttttctctttctaacttatcatgttcatgcctaaaacttatacatgctcacatcattgttcgtttgagctgacttacttctgtaagagagctatctagttaacaactcttgtaactttttatttgctagtcagaacatggattggtgcaagcatgggaatttgctaacactctaccaaatcgattggagtttagacttagtttcaccagaagccatacccggacacttactggggactgtcaacaaagccgcattgtgatgtacttggatgtttcacgtgcctgaggtgcgagttacttggaagggaagcggtttatttaattgttttccgaagtagattttgcttacaagcttttacttttcccttgaaagggtttttcttgttttaagcttttcgaattagagtttcggttgcattaagagtagtcgtattagtcttttttacctaagactcttttttgtaattttcagactatgcaattcaagttttcgagtgttttcttgcttgtgtgattgtgagttggtgaattcgtctttcatacattttgagattatcagaagctttatgctccaccggtagtctagtaccttttctgttactgtacgtgcagggaagtaatctggtaccttctatatatatggaaaaacatacattatacattatgcaaaattcttacaggttagttacttcctggaacttcatttacactttgttttttttgttccattccctcggaagactattccctctgagaaatatgtaatgaacttctgtatgttgctgtttggttcctgttttaatcttcaattttcttgtatagttacagctgcatttacaatgaagtttaagcagacactctctttatatagtgcttctttctggagcaccgtagagctgtctgtggttgatcaccatctgctgccgagagattcagcaatcgcatgtttgatcaggtaaaagtttttatgtcaatgtgtttttttttccgtttgatcaatttatgtctgtattcagattcttatcttcttatagtagcataacacattgtttctttcatttatgtaaactgtttcaagattacagagatgtatgcttcagtcgacattgatgataacttaagatggcattcctacaacagttgcaggcgcattctaactccggcaattctagttaggcaagaggagcattgccaatacctgccacctctgggatttactataccagggttgaagtttatggaagacaccagctatgcacaagccttcaaggggtcatcctacataacaagttgaaccaaccaattgcttgttggtttagtggtaattggagctgaatttggtagggatggcccgtgttcgatccccacaacaacaattgggaggggactggaacctatccacacagaactcgccctgaatccggattagtcctaagggtgaacggggtgctaacaccaaaaaaaaaaacataacaagttgaaccaaacatactttgtttgaattgaagatttagtgatttcatttgatcgattgagatgtcttattataagcgtatatgctcttggatttggccacttaggtgttgtttgacaattggtcattaactcgcttttatattttcttttctcttaggaaaggtgatcctgataatttatattggaacactttttttttctctcactagctttaaaaaagtgttctgtgttacctgcaattcaatttgattatttttcacatagttttacctgaaaaagtgttacctgaaaatcaactgacataagtttttgtttggatccaattaaggacactagataaaccggaataaataatcaaccaattaagtacttcataattaaatatgaagtgtattattatcttatgcttgtgacattgaaggatgttatgatattttaactcaataccttgcaaaatatactggttaaatttcttaacaaggtaacttggcaa

SEQ ID NO: 13 - DNA, 2000 bp, Spinacia oleracea
tttgaagttaggcttaacttgctcaccaattcttaaatagactcgacttacactgaatttattgtgtactatgtctagaaagtaaggtcaacaactttcttctaaattattttggcatgtttattagggttattatgaaaaacatatcaaattggtgttgttagttaggcttgaataatatgattttaagtcacgagacttttataaattaggtaatttgatttaaaaaattgttacatatctaagaaaatggatgttaaatttatcagtcaatgtataaacaataaaagtcaatatgtatgtaaaagggttgctagataaaatctttggttttttggtccacaactccacactaagaggaactccaatgcttagttacaaggtggtgtagttaaaaagtaactccaatagttaactacacggtattatagttaaatttgccaactcaaatttctaactacaatatatttaagctacaaagtttctcattggctgactacaatacgttgtagcgccttataatattttattcaatatacaattttatttattttacctttttaacaatttttttttgatctacctgctgtcctgttcatatgagctacactaatttgatagctgcttacgcaattcttatatcaacggttggctacttgttcaaatatttttatttttttacgagtaagtcattttatgatcattgaagtggctctattattattatcatgcaccgattaacgcaagaataattaactcggtacgaattagtttcaaaataaaatccctcaaaaaaaaaagtttcaaaataaaattaacagaaaaccaaccttctccggtttactgttgttagagcatggaattttccagtaatcgcagaccccaaattatcttccagttgaatcaatccttgatttttggatttgccagaaaactccttgaattttagggttcatatttgatccgtaattgggaaaattttcagcaattgatcttccaaatcagccctacttgtttccagactgcaaatgaaaggtgcgaactttatactgcattttggttttccattagtgtaatttattaagatgaactgcattttgcaattgttttattcgactactcatttttaaatcaaattgcttaattgctagttagttttcttatcatattgccaaaaaaaattatttttgtttaattggtgaaaaagggtaaattatacctagtgtacaagattttcttgcacaccaccgttaatttgttgacacatcatcaaacgtactgaaaaatgagaatgaaagacaataaatatgtcattttaaccaatagaaaaacatgatgtagtaagatccttaattgatagataaataattaaatatcagtccattagttgaatattcaatgaaaatgtatggtccaaaaatggcgtttaatagtcaatgtcatgctttatggggtggtggagtactatgtgactgtgtgtggacttggagaagactagagagtatgattatcaacctatggaccctcaaaatgaaaatgaaaatgatgtttacacgtgctatttgcacggacttcaatgcaaatagtataaatttacggtcaaagttttcattctaaagcgtaaataactttcatgaatggaggacggtagtataagtataacgttatagcctaccattttcttatcatattcacataaatttgttgctgaaatttgttttacttggctaaaatacttttgttcttattggcagataaacatcagtacgtccattattggccaacttgctgagtccattattggccaacttgaacatatacctccaaacaataatcaataatgtcgattatgaagtttgtgaatgcaatttattatcactttcatttataaaatgactacttgattaacacatacaatattacctttctccaaacaccctttcaattctgcttaatcttgttttctcatcatctcttcatctttctgaaaacacaaccca

SEQ ID NO: 14 - DNA, 3444 bp, Spinacia oleracea
atggccgaaatcggatactcggtttgtgcgaaactcatcgaagtgattggcagtgagctgatcaaagagatttgtgacacatggggttacaaatctcttcttgaggacctcaacaaaactgtattgacggtcaggaacgttctcattcaagccggggtgatgcgggagcttactagtgaacaacaaggtttcattgcagaccttaaagatgttgtttatgatgctgatgacttgttcgacaagttactcactcgtgctgagcgaaaacagattgatggaaacgaaatctctgaaaaggtacgtcgtttcttttcctctagtaacaagatcggtcaagcttactacatgtctcgtaaggttaaggaaattaagaagcagttggatgaaattgttgataggcatacaaaatttgggtttagtgctgagtttatacctgtttgtaggggaaggggaaacgagagggaaacacgttcatatatagatgtcaagaatattcttgggagggataaagataagaatgatatcatagataggttgcttaatcgtaatggtaatgaagcttgtagtttcctgaccatagtgggagcgggaggattgggaaaaactgctcttgcacaacttgtgttcaatgatgaaagggtcaaaattgagttccatgatttgaggtattgggtttgtgtctctgatcaagatgggggccaatttgatgtgaaagaaatcctttgtaagattttagaggtggttactaaggagaaagttgataatagttccacattggaattggtacaaagccaatttcaagagaagttaagaggaaagaagtacttccttgttcttgatgatgtatggaacgaagatcgtgagaagtggcttcctttggaagagttgttaatgttgggtcaagggggaagcaaggttgtagtgaccacacgttcagagaagacagcaaatgtcatagggaaaagacatttttatacactggaatgtttgtcgccagattattcatggagcttatttgaaatgtcggcttttcagaaagggcatgagcaggaaaaccatgacgaactagttgatattgggaaaaagattgttgaaaaatgttataacaatccacttgctataacggtggtaggaagtcttctttatggagaggagataagtaagtggcggtcatttgaaatgagtgagttggccaaaattggcaatggggataataagattttgtcgatattgaagctcagttactacaatcttgcaaactctttgaagagttgttttagttattgtgcagtgtttcccaaggatcatgaaataaagaaggagatgttgattgaactttggatggcacaaggatatgttgtgccgttggatggaggtcaaagtatagaagatgctgccgaggaacattttgtaattttgttacgaaggtgtttctttcaagatgtaaagaaggataaatatggtgatgttgattctgttaaaatccacgacttgatgcacgatgtcgcccaagaagtggggagggaggaaatatgtgtagtgaatgataatacaaagaacttgggtgataaaatccgtcatgtacatggtgatgtcaatagatatgcacaaagagtctctctgtgtagccataagattcgttcgtatattggtggtaaatgtgaaaaacgttgggtggatacactaatagacaagtggatgtgtcttaggatgttggacttgtcaaggtcggatgttaaaaatttgcctaattcaataggtaaattgttgcacttgaggtgtcttaacctgtcttataatgatctgttgatactccctgatgcaattacaagactgcataatttgcagacactgcttttaaaagattgcggaagtttaatggagttgccaaaagatttttgcaaattggtcaaactgagacacttggatttaagggattgtgatgatttgattggtatgccattgggaatggataggctaactagtcttagagtactgccattctttgtggtgggtaggaaggaacaaagtgttgacgatgagctgaaagccctaaaaggcctcaccgagataaaaggctccattgatatcacaatctattcaaagtatagaatagttgaaggcatgaatgacacaggagctgggtatttgaagagcatgaaacatctcagggagattggtattacatttgatggtggatgtgttaaccctgaagctgtgttggaaaccctagagccaccttcaaatatcaagagcttatctatagataattacgatggtacaacaattccagtatggggaagagcagagattaattgggcaatctccctctcacatcttgtcgacatttggttttgtggttgtagtaatttgcaggagatgccagtgctgagtaaactgcctcatttgaaatcactgtatctttttatgttttgtaagttagagtacatggagagtagaagcagcagcagtagcagtgacacagaagcagcaacaccagaattaccaacattcttcccttcccttgaaaaacttacactttggtatctggaaaagttgaagggtttggggaacaggagatcgagtagttttccccgcctctctaaattggaaatcaatgaatgcccagatctaacgtggtttcctccttgtccaagccttgaaacgttgaaattggtaaaaaacaatgaagcgttgcaaataatagtaaaaataacaacaacaagaggtaaagaagaaaaagaagaagacaagaatgctggtgttggaaattcacaagatgatgacaatgtcaaattatggaaggtggaaatagacaatcaatgttatctcaaatcactgcccacaaattgtcttactcacctcaacataaaagtaagagattccgaaggggaggagattgaattggaagttggggaggcatttcagaagtgtgcatcttctttgagaagcctcatcataatcggaaatcacggaataaataaagtgatgagactgtctggaagaacagggttggagcatttcactctgttggactcactcaaattttcatatatagaagaccaggaagatgagggcgaagacaacatcatattctggaaatcctttcctcaaaacctccgcagtttggaaattaaaggctcttgcaaaatgacaagtttgcccatggggatgcagtacttaacctccctccaaaccctccatctatcatattgtgatgaattgaattcccttccagaatggataagcagcttatcatctcttcaatccctgttcatatacaattgtccagccctgaaatcactaccagaagcaatgaagaacctcacctcccttcagagacttgagatacagcattgtccagacctagctgaaagatgcagaaaacccaacggggaggactatcccaaaattcaacacatccccaaaattgaaatatggtag

SEQ ID NO: 15 - protein, 1147 aa, Spinacia oleracea
MAEIGYSVCAKLIEVIGSELIKEICDTWGYKSLLEDLNKTVLTVRNVLIQAGVMRELTSEQQGFIADLKDVVYDADDLFDKLLTRAERKQIDGNEISEKVRRFFSSSNKIGQAYYMSRKVKEIKKQLDEIVDRHTKFGFSAEFIPVCRGRGNERETRSYIDVKNILGRDKDKNDIIDRLLNRNGNEACSFLTIVGAGGLGKTALAQLVFNDERVKIEFHDLRYWVCVSDQDGGQFDVKEILCKILEVVTKEKVDNSSTLELVQSQFQEKLRGKKYFLVLDDVWNEDREKWLPLEELLMLGQGGSKVVVTTRSEKTANVIGKRHFYTLECLSPDYSWSLFEMSAFQKGHEQENHDELVDIGKKIVEKCYNNPLAITVVGSLLYGEEISKWRSFEMSELAKIGNGDNKILSILKLSYYNLANSLKSCFSYCAVFPKDHEIKKEMLIELWMAQGYVVPLDGGQSIEDAAEEHFVILLRRCFFQDVKKDKYGDVDSVKIHDLMHDVAQEVGREEICVVNDNTKNLGDKIRHVHGDVNRYAQRVSLCSHKIRSYIGGKCEKRWVDTLIDKWMCLRMLDLSRSDVKNLPNSIGKLLHLRCLNLSYNDLLILPDAITRLHNLQTLLLKDCGSLMELPKDFCKLVKLRHLDLRDCDDLIGMPLGMDRLTSLRVLPFFVVGRKEQSVDDELKALKGLTEIKGSIDITIYSKYRIVEGMNDTGAGYLKSMKHLREIGITFDGGCVNPEAVLETLEPPSNIKSLSIDNYDGTTIPVWGRAEINWAISLSHLVDIWFCGCSNLQEMPVLSKLPHLKSLYLFMFCKLEYMESRSSSSSSDTEAATPELPTFFPSLEKLTLWYLEKLKGLGNRRSSSFPRLSKLEINECPDLTWFPPCPSLETLKLVKNNEALQIIVKITTTRGKEEKEEDKNAGVGNSQDDDNVKLWKVEIDNQCYLKSLPTNCLTHLNIKVRDSEGEEIELEVGEAFQKCASSLRSLIIIGNHGINKVMRLSGRTGLEHFTLLDSLKFSYIEDQEDEGEDNIIFWKSFPQNLRSLEIKGSCKMTSLPMGMQYLTSLQTLHLSYCDELNSLPEWISSLSSLQSLFIYNCPALKSLPEAMKNLTSLQRLEIQHCPDLAERCRKPNGEDYPKIQHIPKIEIW

SEQ ID NO: 16 - DNA, 6117 bp, Spinacia oleracea
atggctgaaatcggatactcggtttgttcaaaacttattgaagtgatgggcagtaagatcattaaagagatttgtgacatgtggggttacaaatctcatcttgaagacctcaacaaatctgtcttgacgatcaaggatgtgctcttggatgctgaggcgaagcgggatctttcccgtgaacaacagagttacattgcagaacttaaggatgttgtttacgatgctgatgatttgttcgatgagttcctcactcttgctgagctcaaacagattgatggcaacaacaagggtggtggtaaattctccaaaaaggtacgtcgtttcttttcttctaataaggagaagatgggtcaagcttacaagatgtctcatatggttaaagaaattaagaagcagttgggtgaaattgttgataggtataccaaatttgggtttattgttgattataaacctattattaggagaagggaggaaacatgttcttattttgtaggtgccaaggagattgttgggagggataaggataaagatgttatcataggcatgttgctagatcatgataacgattgtagtttcttggctgttgtgggggttggaggggtgggaaaaactactcttgcccaacttgtgtataatgatgaaagagtcaaaagtgagttccaagatttgaggtattgggtttgtgtctctgatcaagatgggggacaatttgatgacaaaagaattctttgtaagattatagagttagttacgggccagattcctccgagtaacgagagcatggaatcggtgcgtaagaaatttcaagaggaattaggaggaaagaagtacttccttgttcttgatgatgtatggaacgaggatcgccagaagtggcttcatctagaaaatttcttgaaattgggtcaagggggaagcaagattgtggtaaccacacgttcagagaagacggcaaatgttatagggaaaagacaagactataaactagaatgtttgtcagcagaggattcatggcgcttatttgaaatgtcagcttttgacgaagggcatggccaggaaaactatgacgaattagtgacgattggcaagaagattgttgaaaaatgttataacaatccacttgctataacagtggtaggaagccttctttttggacaagagataaataagtggcggtcgtttgaaagcagtggattagcccaaattgccaatggtgataatcagattttcccgatattaaagctcagttaccacaatcttccacactccttgaagagctgctttagctattgtgcagtgtttcccaaagattatgaaataaagaaggagatgttgattgatctttggatagcacaaggatacattataccgttggatggaggtcaaagtatagaagatgctgccgaggaacattttgtaattttgttaagaagatgtttctttcaagatgtaaagaaggattctcttggtaatgttgattatgttaaaatccacgacttaatgcacgatgtcgctcaagaagtggggaaggaggaaatctgtgtagtgacttcaggtacaaagaagttggctgataaaatccgtcacgtgggttgtgttgtcgatagagatccagaaatagtctttttatgtagcaataagattcgttcgtatattagcggtcgttgtataaagaatccggtggattcacaaatagacaactggatgcgccttagggtgttggacttgtcagattcatgtgttaaagatttgtctgattcaataggtaagctgctgcacttaaggtatcttaacctctcttctaatataaagttggagataatccctgatgcaattacaagactgcataacttgcagacactacttttagaatattgcagaagtttaaaggagttgccaaaagatttttgcaaattggtcaaactgagacacttggatttaaggggttgtcagtgtttgattggtatgccattgggaatggataggctaattagtcttagagtactaccaaaagttgtggtgggtaagaaggaacaaagtgatgatcagctgaaagccctaaaaggcctcaccgagataaaaggctccattgatatcacaatctattcaaagtatagaatagttgaaggcatgaatgacacaggaggagctgggtatttgaagagcatgaaacatctcacgggggttgatattagatttgatgatagagaaggtggatgtgttaaccctgaagctgtgttggcaaccctagagccaccttcaaatatcaagaggttagagatgtggcattacagtggtacaacaattccagtatggggaagagcagagattaattgggcaatctccctctcacatcttgtcgacatccagcttagtttttgtagaaatttgcaggagatgccagtgctgagtaaactgcctcatttgaaatcactggaacttacagagttggataacttagagtacatggagagtagaagcagcagcagtagcagtgacacagaagcagcaacaccagaattaccaacattcttcccttcccttgaaaaactttcactttggggtctggaaaagttgaagggtttggggaacaggagatcgagtagttttccccgcctctctaaattggaaatctgggaatgcccagatctaacgtcatttccttcttgtccaagccttgaaaagttggaattgaaagaaaacaatgaagcgttgcaaataatagtaaaaataacaacaacaagaggtaaagaagaaaaagaagaagacaagaatgctggtgttggaaattcacaagatgatgacaatgtcaaattatggaaggtggaaatagacaatctgggttatctcaaatcactgcccacaaattgtcttactcacctcgaccttacaataagagattccaaggagggggagggtgaatgggaagttggggaggcatttcagaagtgtgtatcttctttgagaaagctcagcataatcggaaatcacggaataaataaagtgaagagactgtctggaagaacagggttggagcatttcactctgttggactcactcgaactttcaaatatagaagaccaggaagatgagggcgaagacaacatcatgttctggaaatcctttcctcaaaacctccgcaatttggaaattaattactctgacaaaatgacaagttttcccatggggatgcagtacttaacctccctccaaaccatccatctttatgattgttataaattgaattccattccagaatggataagcagcttatcatctcttcaatccctgcacataggaaaatgtccagccctaaaatcactaccagaagcaatgcggaacctcacctcccttcagagacttacgatatggcagtgtccagacctaattgaaagatgcaaagaacctaacggggaggactatcccaaaattgtaagtcattgcagaaagtaatttattcatttatatttattttatgcttagaatgatatacgcagtcgtcctttggtttcaaatcttgaatttggtttttgttttctttctttgtttctttattcaacaccagtccatttatgattgattcattaaaaaaaggatggagttttatggatttgaagaagacaacgaattgagattcctggggtttttttttcgttggggttggttttcatgtatatgttgctgattaaataccagactgatgatgatgatgtgtttatgggttttaaatcagattaaatatatgggaaatgtaagttaattggggatgcacataaggtgtttgatgaaatgtctattagaaatgttgtttcttggacttagaatgatatacactgtcgtcctttggtttccaatctggaatttggtttttgttttcttagtttgtttctttattccacactagcccattttttttaaactacctgcaactactgaatttcatttaccctgtatctcagattatatggtagtaattctcatttactcaacactagcttgatcctgaacgcagccaaccttcaggttagaatccgccttactcatccttttgtcatgaattgttttaagttgttttgcttgcttgtgtaatcataattcatagtatacgattcatcattcactatgtctataggcaagatattggaattgttcacgatttcctgaagtttctttgtttttgttgataccaccatattgcagcttatagtgactaagttaatgaatgtttccaaaaattagtcatataaattcttcttctctctctattacataaactctttttctctttctaacttatcatgttcatgtctaaaacgtatacatgctcacatcattgttcgtttcagctgacttacttatgtaagagagctatctagttaacaactcttgtaactttttatttgctagtcagaacatggattggtgcaagcatgggaatttgccaacactctaccaaatcgattggagtttggacttagtttcaccagaagccatacccggacacttactggggactgtcaacaaagccgcattgtgatgtacttggatgtttcacgtgcctgaggtgtgagttacttggaagggaagcggtttatttaattgttttcctaagtagattttgcttacaagcttttacttttcacttggaagggttttcttgttttaagcttttcgaattagagtttcggttgcattaagagtagtcgtattagtcttttttacctaagactcttttttgtaattttcagactatgcaattcaagttttgagtgttttcttgcttgtgtgattgtgagttggtgaattcgtctttcatacattttgagattatcagaagctttatgctccaccggtagtctagtaccttttctgttactgtacgtgcagggaagtaatctggtaccttctatatatatggaaaaacatacattatacattacgcaaaattcttacaggttagttacttcctggaacttcatttacacttggttttttttgttccattccctcggaagactattccctctgagaaatatgtaatgaatttctgtattcagctgcatttacaatgaagtttaagcagacactctctttatatagtgcctctttctggagcaccgtagagctgtctgtggttgatcaccatatgctgccgagagattcagcaatcgcgtgtttgatcaggtaaaagtttttatgtcaatgtgttttttttttccgtttgatcaatttatgtctgtattcagattcttatcttcttacagtagcataacacattgtttctttcatttatgtaaactgtttcaagattacagagatgtatgcttcagtcgacattgatgataacttaagatggcattcctacaacagttgcaggcgcattctaactccggcaattctagttaggcaagaggagcattgccaatacctgccacctctgggatttactataccagggttgaagtttatggaagacaccagctatgcacaagccttcaaggggtcatcctacataacaagttgaaccaaccaattgcttgttggttcagtggtaattggagctgaattcggtagggatggcccgtgttcgatccccacaacaacaattgggaggggactggaacctatccacacagaactcgccctgaatccggattagccctaagggtgaacggggtgctaacaccaaaaaaaaaacataacaagttgaatcaaacatactttgtttgaattgaagatttagtgatttcatttgatcgattgagatgtcttattataagcgtatatgctcttggatttggccacttaggtgttgtttgacaattggtcattaactcgcttttatattttcgtttctcttaggaaaggtgatcctgagaatttatattgaaacactttttttatctctcactagctttaaaaaagtgttctgtgttacctgcaattcaacttgattatttttcacatagttttacctgaaaaagtgttatctgaaaatcaactgacataaatttttgtttggatcaaattaaggatactagataaatcggaaaaaataatcaaccaattaagtacttcataattaaatatgaagtatattattatcttatgcttgtg

SEQ ID NO: 17 - DNA, 2000 bp, Spinacia oleracea
tggtccacaactccacactaagaggaactccaatgcttagttacaaggtggtgtagttaaaaagtaattccaatagttaactacacggtattatagttaaatttgccaactcaaatttctaactacaatatatttaagctacaaagtttctcattggctgactacaatacgttgtagcgccttataatattttattcaatatacaattttatttattttacctttttaacaatttttttttgatctacctgctgtcctgttcatatgagctacactaatttgatagctgcttacgcaattcttatatcaacggttggctacttgttcaaatatttttatttttttacgagtaagtcattttatgatcattgaagtggctctattattattatcatgcaccgattaacgcaagaataattaactcggtacgaattagtttcaaaataaaatccctcaaaaaaaaaagtttcaaaataaaattaacagaaaaccaaccttctccggtttactgttgttagagcatggaattttccagtaatcgcagaccccaaattatcttccagttgaatcaatccttgatttttggatttgccagaaaactccttgaattttagggttcatatttgatccgtaattgggaaaattttcagcaattgatcttccaaatcagccctacttgtttccagactgcaaatgaaaggtgcgaactttatactgcattttggttttccattagtgtaatttattaagatgaactgcattttgcaattgttttattcgactactcatttttaaatcaaattgcttaattgctagttagttttcttatcatattgccaaaaaaaattatttttgtttaattggtgaaaaagggtaaattatacctagtgtacaagattttcttgcacaccacccttaatttgttgacacatcatcaaacgtactgaaaaatgagaatgaaagacaataaatatgtcattttaaccaatagaaaaacatgatgtagtaagatccttaattgatagataaataattaaatatcagtccattagttgaatattcaatgaaaatgtatggtccaaaaatggcgtttaatagtcaatgtcatgctttatggggtggtggagtactatgtgactgtgtgtggacttggagaagactagagagtatgattatcaacctatggaccctcaaaatgaaaatgaaaatgatgtttttacactttaaaatcgtcaagaaacaacaatcctttttagcaatagtatttacacgcgctagttgcacgaactttaatgcaaatagtataaatttacggtcaaagttttcatactttagacacatactctctccgtcccttaatactcgcaccgctttccttttcgggccgtcccttaatacttgcaccgcttctataaatggaaatctatttctcacaattacctactaacccacctacactcatcgtccctacaaaaaatcatttaaaaattcacaccccacactcaccactcctcacccattacacatttcctactaactatattaaaaaaatatcccactataaactaacactcattaaattaataagtcaattcaaatatcttaaactccgcaccggtcaaatcggtgcgagtattaagggacggagggagtattatagagtgtaaataactttcatgaatggagggagtaaaaaattgttttacttggctaaaatacttttgttcttattggcagataaacatgagtccattattggccaacttgaacatatacctccaaacaataatcaatgatgtcgattatgaagtttgtgaatgcaatttattatcactttcattgcaagttgtcatctgtgctgagtgttgatttataaaaaggactacttgattaacacatacaatattactccacctttctccagacaacctttcttttctgcttttatcttgttttctcatcttaattcatctcttcatctttctgaaaaacccaaccca

SEQ ID NO: 18 - DNA, 3444 bp, Spinacia oleracea
atggctgaaatcggatactcggtttgttcaaaacttattgaagtgatgggcagtaagatcattaaagagatttgtgacatgtggggttacaaatctcatcttgaagacctcaacaaatctgtcttgacgatcaaggatgtgctcttggatgctgaggcgaagcgggatctttcccgtgaacaacagagttacattgcagaacttaaggatgttgtttacgatgctgatgatttgttcgatgagttcctcactcttgctgagctcaaacagattgatggcaacaacaagggtggtggtaaattctccaaaaaggtacgtcgtttcttttcttctaataaggagaagatgggtcaagcttacaagatgtctcatatggttaaagaaattaagaagcagttgggtgaaattgttgataggtataccaaatttgggtttattgttgattataaacctattattaggagaagggaggaaacatgttcttattttgtaggtgccaaggagattgttgggagggataaggataaagatgttatcataggcatgttgctagatcatgataacgattgtagtttcttggctgttgtgggggttggaggggtgggaaaaactactcttgcccaacttgtgtataatgatgaaagagtcaaaagtgagttccaagatttgaggtattgggtttgtgtctctgatcaagatgggggacaatttgatgacaaaagaattctttgtaagattatagagttagttacgggccagattcctccgagtaacgagagcatggaatcggtgcgtaagaaatttcaagaggaattaggaggaaagaagtacttccttgttcttgatgatgtatggaacgaggatcgccagaagtggcttcatctagaaaatttcttgaaattgggtcaagggggaagcaagattgtggtaaccacacgttcagagaagacggcaaatgttatagggaaaagacaagactataaactagaatgtttgtcagcagaggattcatggcgcttatttgaaatgtcagcttttgacgaagggcatggccaggaaaactatgacgaattagtgacgattggcaagaagattgttgaaaaatgttataacaatccacttgctataacagtggtaggaagccttctttttggacaagagataaataagtggcggtcgtttgaaagcagtggattagcccaaattgccaatggtgataatcagattttcccgatattaaagctcagttaccacaatcttccacactccttgaagagctgctttagctattgtgcagtgtttcccaaagattatgaaataaagaaggagatgttgattgatctttggatagcacaaggatacattataccgttggatggaggtcaaagtatagaagatgctgccgaggaacattttgtaattttgttaagaagatgtttctttcaagatgtaaagaaggattctcttggtaatgttgattatgttaaaatccacgacttaatgcacgatgtcgctcaagaagtggggaaggaggaaatctgtgtagtgacttcaggtacaaagaagttggctgataaaatccgtcacgtgggttgtgttgtcgatagagatccagaaatagtctttttatgtagcaataagattcgttcgtatattagcggtcgttgtataaagaatccggtggattcacaaatagacaactggatgcgccttagggtgttggacttgtcagattcatgtgttaaagatttgtctgattcaataggtaagctgctgcacttaaggtatcttaacctctcttctaatataaagttggagataatccctgatgcaattacaagactgcataacttgcagacactacttttagaatattgcagaagtttaaaggagttgccaaaagatttttgcaaattggtcaaactgagacacttggatttaaggggttgtcagtgtttgattggtatgccattgggaatggataggctaattagtcttagagtactaccaaaagttgtggtgggtaagaaggaacaaagtgatgatcagctgaaagccctaaaaggcctcaccgagataaaaggctccattgatatcacaatctattcaaagtatagaatagttgaaggcatgaatgacacaggaggagctgggtatttgaagagcatgaaacatctcacgggggttgatattagatttgatgatagagaaggtggatgtgttaaccctgaagctgtgttggcaaccctagagccaccttcaaatatcaagaggttagagatgtggcattacagtggtacaacaattccagtatggggaagagcagagattaattgggcaatctccctctcacatcttgtcgacatccagcttagtttttgtagaaatttgcaggagatgccagtgctgagtaaactgcctcatttgaaatcactggaacttacagagttggataacttagagtacatggagagtagaagcagcagcagtagcagtgacacagaagcagcaacaccagaattaccaacattcttcccttcccttgaaaaactttcactttggggtctggaaaagttgaagggtttggggaacaggagatcgagtagttttccccgcctctctaaattggaaatctgggaatgcccagatctaacgtcatttccttcttgtccaagccttgaaaagttggaattgaaagaaaacaatgaagcgttgcaaataatagtaaaaataacaacaacaagaggtaaagaagaaaaagaagaagacaagaatgctggtgttggaaattcacaagatgatgacaatgtcaaattatggaaggtggaaatagacaatctgggttatctcaaatcactgcccacaaattgtcttactcacctcgaccttacaataagagattccaaggagggggagggtgaatgggaagttggggaggcatttcagaagtgtgtatcttctttgagaaagctcagcataatcggaaatcacggaataaataaagtgaagagactgtctggaagaacagggttggagcatttcactctgttggactcactcgaactttcaaatatagaagaccaggaagatgagggcgaagacaacatcatgttctggaaatcctttcctcaaaacctccgcaatttggaaattaattactctgacaaaatgacaagttttcccatggggatgcagtacttaacctccctccaaaccatccatctttatgattgttataaattgaattccattccagaatggataagcagcttatcatctcttcaatccctgcacataggaaaatgtccagccctaaaatcactaccagaagcaatgcggaacctcacctcccttcagagacttacgatatggcagtgtccagacctaattgaaagatgcaaagaacctaacggggaggactatcccaaaattattatatggtag

SEQ ID NO: 19 - protein, 1147 aa, Spinacia oleracea
MAEIGYSVCSKLIEVMGSKIIKEICDMWGYKSHLEDLNKSVLTIKDVLLDAEAKRDLSREQQSYIAELKDVVYDADDLFDEFLTLAELKQIDGNNKGGGKFSKKVRRFFSSNKEKMGQAYKMSHMVKEIKKQLGEIVDRYTKFGFIVDYKPIIRRREETCSYFVGAKEIVGRDKDKDVIIGMLLDHDNDCSFLAVVGVGGVGKTTLAQLVYNDERVKSEFQDLRYWVCVSDQDGGQFDDKRILCKIIELVTGQIPPSNESMESVRKKFQEELGGKKYFLVLDDVWNEDRQKWLHLENFLKLGQGGSKIVVTTRSEKTANVIGKRQDYKLECLSAEDSWRLFEMSAFDEGHGQENYDELVTIGKKIVEKCYNNPLAITVVGSLLFGQEINKWRSFESSGLAQIANGDNQIFPILKLSYHNLPHSLKSCFSYCAVFPKDYEIKKEMLIDLWIAQGYIIPLDGGQSIEDAAEEHFVILLRRCFFQDVKKDSLGNVDYVKIHDLMHDVAQEVGKEEICVVTSGTKKLADKIRHVGCVVDRDPEIVFLCSNKIRSYISGRCIKNPVDSQIDNWMRLRVLDLSDSCVKDLSDSIGKLLHLRYLNLSSNIKLEIIPDAITRLHNLQTLLLEYCRSLKELPKDFCKLVKLRHLDLRGCQCLIGMPLGMDRLISLRVLPKVVVGKKEQSDDQLKALKGLTEIKGSIDITIYSKYRIVEGMNDTGGAGYLKSMKHLTGVDIRFDDREGGCVNPEAVLATLEPPSNIKRLEMWHYSGTTIPVWGRAEINWAISLSHLVDIQLSFCRNLQEMPVLSKLPHLKSLELTELDNLEYMESRSSSSSSDTEAATPELPTFFPSLEKLSLWGLEKLKGLGNRRSSSFPRLSKLEIWECPDLTSFPSCPSLEKLELKENNEALQIIVKITTTRGKEEKEEDKNAGVGNSQDDDNVKLWKVEIDNLGYLKSLPTNCLTHLDLTIRDSKEGEGEWEVGEAFQKCVSSLRKLSIIGNHGINKVKRLSGRTGLEHFTLLDSLELSNIEDQEDEGEDNIMFWKSFPQNLRNLEINYSDKMTSFPMGMQYLTSLQTIHLYDCYKLNSIPEWISSLSSLQSLHIGKCPALKSLPEAMRNLTSLQRLTIWQCPDLIERCKEPNGEDYPKIIIW

SEQ ID NO: 20 - DNA, 6060 bp, Spinacia oleracea
atggccgaaatcggatactcggtttgtgcgaaactcatcgaagtgattggcagtgagctgatcaaagagatttgtgacacatggggttacaaatctcttcttgaggacctcaacaaaactgtattgacggtcaggaacgttctcattcaagccggggtgatgcgggagcttactagtgaacaacaaggtttcattgcagaccttaaagatgttgtttatgatgctgatgacttgttcgacaagttactcactcgtgctgagcgaaaacagattgatggaaacgaaatctctgaaaaggtacgtcgtttcttttcctctagtaacaagatcggtcaagcttactacatgtctcgtaaggttaaggaaattaagaagcagttggatgaaattgttgataggcatacaaaatttgggtttagtgctgagtttatacctgtttgtaggggaaggggaaacgagagggaaacacgttcatatatagatgtcaagaatattcttgggagggataaagataagaatgatatcatagataggttgcttaatcgtaatggtaatgaagcttgtagtttcctgaccatagtgggagcgggaggattgggaaaaactgctcttgcacaacttgtgttcaatgatgaaagggtcaaaattgagttccatgatttgaggtattgggtttgtgtctctgatcaagatgggggccaatttgatgtgaaagaaatcctttgtaagattttagaggtggttactaaggagaaagttgataatagttccacattggaattggtacaaagccaatttcaagagaagttaagaggaaagaagtacttccttgttcttgatgatgtatggaacgaggatcgtgagaagtggcttcctttggaagagttgttaatgttgggtcaagggggaagcaaggttgtagtgaccacacgttcagagaagacagcaaatgtcatagggaaaagacatttttatacactggaatgtttgtcaccagattattcatggagcttatttgaaatgtcggcttttcagaaagggcatgagcaggaaaaccatcacgaactagttgatattgggaaaaagattgttgaaaaatgttataacaatccacttgctataacggtggtaggaagtcttctttatggagaggagataagtaagtggcggtcatttgaaatgagtgagttggccaaaattggcaatggggataataagattttgccgatattaaagctcagttaccataatcttataccctcgttgaagagttgttttagttattgtgcagtgtttcccaaggatcatgaaataaagaaggagatgttgattgaactttggatggcacaaggatatgttgtgccgttggatggaggtcaaagtatagaagatgctgccgaggaacattttgtaattttgttacgaaggtgtttctttcaagatgtaaagaaggataaatatggtgatgttgattctgttaaaatccacgacttgatgcacgatgtcgcccaagaagtggggagggaggaattatgtgtagtgaatgataatacaaagaacttgggtgataaaatccgtcatgtacatcgtgatgtcattagatatgcacaaagagtctctctgtgtagccatagccataagattcgttcgtatattggtggtaattgtgaaaaacgttgtgtggatacactaatagacaagtggatgtgtcttaggatgttggacttgtcaaggtcggatgttaaaaatttgcctaattcaataggtaaattgttgcacttgaggtatcttaacctgtcagataatagaaatctaaagatacttcctgatgcaattacaagactgcataatttgcagacacttcttttagtagattgcagaagtttaaaggagttgccaaaagatttttgcaaattggtcaaactgaggcacttggaattacagggttgtcatgatttgattggtatgccatttggaatggataagctaactagtcttagagtactaccaaaagttgtggtgggtaagaaggaacaaagtgatgatcagctgaaagccctaaaaggcctcaccgagataaaaggctccattgatatcacaatctattcaaagtatagaatagttgaaggcatgaatgacacaggaggagctgggtatttgaagagcatgaaacatctcacgggggttgatattagatttgatgatagagaaggtggatttgttaaccctgaagctgtgttggcaaccctagagccaccttcaaatatcaagagcttatctatacatcgttttgatggtaaaacacttccagtatggggaagagcagagattaattgggcaatctccctctcacatcttgtcgacatccagctttggcattgtcgtaatttgcaggagatgccagtgctgagtaaactgcctcatttgaaatcactggacctttataatttgattagtttagagtacatggagagcacaagcagaagcagtagcagtgacacagaagcagcaacaccagaattaccaacattcttcccttcccttgaaaaacttacactttggcgtctggacaagttgaagggttttgggaacaggagatcgagtagttttccccgcctctctgaattggaaatctgggaatgcccagatctaacgtcatttccttcttgtccaagccttgaagagttggaattggaagaaaacaatgaagcgttgcaaataatagtaaaaataacaacaacaagaggtaaagaagaaaaagaagaagacaagaatgctggtgttggaaattcacaagatgatgacaatgtcaaattatggacggtggaaatagacaatctgggttatctcaaatcactgcccacaaattgtcttactcacctcgaccttacaataagagattccaaggagggggagggtgaatgggaagttggggatgcatttcagaagtgtgtatcttctttgagaagcctcaccataatcggaaatcacggaataaataaagtgaagagactgtctggaagaacagggttggagcatttcactctgttggactcactcaaattttcaaagatagaagaccaggaagatgagggcgaagacaacatcatattctggaaatcctttcctcaaaacctccgcagtttgagaattgaagactctgacaaaatgacaagttttcccatggggatgcagtacttaacctccctccaaaccatccatctttatgattgttataaattgaattccattccagaatggataagcagcttatcatctcttcaatccctgcacataggaaaatgtccagccctaaaatcactaccagaagcaatgcggaacctcacctcccttcagagacttacgatatggcagtgtccagacctaattgaaagatgcaaagaacctaacggggaggactatcccaaaattcaacacatccccaaaattgtaagtcattgcagaaagtaatttattcatttatatttattttatgcttagaatgatatacgcagtcgtcctttggtttcaaatcttgaatttggtttttgttttctttctttgtttctttattcaacaccagtccatttatgattgattcattaaaaaaaggatggagttttgtggatttgaagaagacaacgaattgagattcgtggggttttctttttgttggggttggatttcatgtatatgttgctgattgaatacgagactgatgatgatgatgtgtttaatttatgggttttaaatcagattaaatatatgggaaatgtaagttaattggggatgcacataaggtgtttgatgaaatgtctattagaaatgttgtttcttggacttagaatgatatacactgtcgtcctttggtttccaatcttacatttggttagaatccggcttactcatccttttgtccagttttcaagtaattgttttggcaggatcaattctctaattgttgtacaccgtatattgcaatttatagtgactacagttaatgaatgtttacaaaaaattagtcatgtaaaaacttcttctctgtccattacataaactctttttctctttctaacttatcatgttcatgtctaaacaattaaacatgctcacatcaatgttcatttaagctaacttacttctgtaagagagcgagctagttaaaaactcctttaactttctgttttatactcaggacatggattgatgcaagcatgaagaacttcgggaatttgctaaaactctaccaaagcgatgagagtttggactttatttcacttgaagtcagggactgtcaacaaagccacagtgtgcatgttggctgtttcacttggacgataaaaaggtttatttaattgttttcctaagtgtatttggcttacaagcttttacttttcacttgaaagggtttttcttgttttaagcttttcgaattagagttttcggttgaagtaagagtagtcgtattagtcttttacctaaggaagactcttttttgtaattttcagactatgcaattcaagttttcgagtgttttcttgcttgtgtgattgtgagttggtgaattcgtctttcatacattttgagattatcagaagctttatgctccaccggtagtctagtaccttttctgttactgtgcagggaagtaatctggtaccttctatatatatggaaaaacatacattatacattatgcaaaattcttacaggttagttacttcctggaacttcatttacacttagttttttttgttccattccctcggaatcaagtcattccctctgagaaatatgtaatgaacttctgtatgttgctgtttggttcctgttttaatcttcaattttcttgtatagttacagctgcatttacaatgaagtttaagcagacactctctttatatagtgcctctttctggagcaccgtagagctgtctgtggttgatcaccatctgctgccgagagattcagcaatcgcgtgtttgatcaggtaaaagtttttatgtcaatgtgtttttttttccgtttgatcaatttatgtctgtattcagattcttatcttcttacagtagcataacacattgtttctttcatttatgtaaactgtttcaagattacagagatgtatgcttcagtcgacattgatgataacttaagatggcattcctacaacagttgcaggcgcattctaactccggcaattctagttaggcaagaggagcattgccaatacctgccacctctgggatttactataccagggttgaagtttatggaagacaccagctatgcacaagccttcaaggggtcatcctacataacaagttgaaccaaccaattgcttgttggttcagtggtaattggagctgaatttggtagggatggcccgtgttcgatccccacaacaacaattgggaggggactggaacctatccacacagaactcgccctgaatccggattagccctaagggtgaacggggtgctaacaccaaaaaaaaaaacataacaagttgaaccaaacatactttgtttgaattgaagatttagtgatttcatttgatcgattgagatgtcttattataagcgtatatgctcttggatttggccacttaggtgttgtttgacaattggacattaactcgcttttatattttcttttctcttaggaaaggtgatcctgagaatttatattggaacactttttttttctcactagctttaaaaaagtgttctgtgttacctgcaattcaatttgattatttttcacatagttttacctgaaaaagtgttacctgaaaaagtgttacctgaaaatcaactgacataagtttttgtttggatccaattaaggacactagataaatcggaataaataatcaaccaattaagtacttcataattaaatatgaagtgtattattatcttatgcttgtgacattgaaggatgttatgatattttaactcaataccttgcaaaatatactggttaaatttcttaacaaggtaacttggcaacaaattcaggttgaaagctttgagaaatagagctacgaaacat

SEQ ID NO: 21 - DNA, 2000 bp, Spinacia oleracea
tttgaagttaggcttaacttgctcaccaattcttaaatagactcgacttacactgaatttattgtgtactatgtctagaaagtaaggtcaacaactttcttctaaattattttggcatgtttattagggttattatgaaaaacatatcaaattggtgttgttagttaggcttgaataatatgattttaagtcacgagacttttataaattaggtaatttgatttaaaaaattgttacatatctaagaaaatggatgttaaatttatcagtcaatgtataaacaataaaagtcaatatgtatgtaaaagggttgctagataaaatctttggttttttggtccacaactccacactaagaggaactccaatgcttagttacaaggtggtgtagttaaaaagtaactccaatagttaactacacggtattatagttaaatttgccaactcaaatttctaactacaatatatttaagctacaaagtttctcattggctgactacaatacgttgtagcgccttataatattttattcaatatacaattttatttattttacctttttaacaatttttttttgatctacctgctgtcctgttcatatgagctacactaatttgatagctgcttacgcaattcttatatcaacggttggctacttgttcaaatatttttatttttttacgagtaagtcattttatgatcattgaagtggctctattattattatcatgcaccgattaacgcaagaataattaactcggtacgaattagtttcaaaataaaatccctcaaaaaaaaaagtttcaaaataaaattaacagaaaaccaaccttctccggtttactgttgttagagcatggaattttccagtaatcgcagaccccaaattatcttccagttgaatcaatccttgatttttggatttgccagaaaactccttgaattttagggttcatatttgatccgtaattgggaaaattttcagcaattgatcttccaaatcagccctacttgtttccagactgcaaatgaaaggtgcgaactttatactgcattttggttttccattagtgtaatttattaagatgaactgcattttgcaattgttttattcgactactcatttttaaatcaaattgcttaattgctagttagttttcttatcatattgccaaaaaaaattatttttgtttaattggtgaaaaagggtaaattatacctagtgtacaagattttcttgcacaccaccgttaatttgttgacacatcatcaaacgtactgaaaaatgagaatgaaagacaataaatatgtcattttaaccaatagaaaaacatgatgtagtaagatccttaattgatagataaataattaaatatcagtccattagttgaatattcaatgaaaatgtatggtccaaaaatggcgtttaatagtcaatgtcatgctttatggggtggtggagtactatgtgactgtgtgtggacttggagaagactagagagtatgattatcaacctatggaccctcaaaatgaaaatgaaaatgatgtttacacgtgctatttgcgcggacttcaatgcaaatagtataaatttacggtcaaagttttcattctaaagcgtaaataactttcatgattggaggacggtagtataagtataacgttatagcctaccattttcttatcatattcacataaatttgttgctgaaatttgttttacttggctaaaatacttttgttcttattggcagataaacatcagtacgtccattattggccaacttgctgagtccattattggccaacttgaacatatacctccaaacaataatcaataatgtcgattatgaagtttgtgaatgcaatttattatcactttcatttataaaatgactacttgattaacacatacaatattacctttctccaaacaccctttcaattctgcttaatcttgttttctcatcatctcttcatctttctgaaaacacaaccca

SEQ ID NO: 22 - DNA, 3462 bp, Spinacia oleracea
atggccgaaatcggatactcggtttgtgcgaaactcatcgaagtgattggcagtgagctgatcaaagagatttgtgacacatggggttacaaatctcttcttgaggacctcaacaaaactgtattgacggtcaggaacgttctcattcaagccggggtgatgcgggagcttactagtgaacaacaaggtttcattgcagaccttaaagatgttgtttatgatgctgatgacttgttcgacaagttactcactcgtgctgagcgaaaacagattgatggaaacgaaatctctgaaaaggtacgtcgtttcttttcctctagtaacaagatcggtcaagcttactacatgtctcgtaaggttaaggaaattaagaagcagttggatgaaattgttgataggcatacaaaatttgggtttagtgctgagtttatacctgtttgtaggggaaggggaaacgagagggaaacacgttcatatatagatgtcaagaatattcttgggagggataaagataagaatgatatcatagataggttgcttaatcgtaatggtaatgaagcttgtagtttcctgaccatagtgggagcgggaggattgggaaaaactgctcttgcacaacttgtgttcaatgatgaaagggtcaaaattgagttccatgatttgaggtattgggtttgtgtctctgatcaagatgggggccaatttgatgtgaaagaaatcctttgtaagattttagaggtggttactaaggagaaagttgataatagttccacattggaattggtacaaagccaatttcaagagaagttaagaggaaagaagtacttccttgttcttgatgatgtatggaacgaggatcgtgagaagtggcttcctttggaagagttgttaatgttgggtcaagggggaagcaaggttgtagtgaccacacgttcagagaagacagcaaatgtcatagggaaaagacatttttatacactggaatgtttgtcaccagattattcatggagcttatttgaaatgtcggcttttcagaaagggcatgagcaggaaaaccatcacgaactagttgatattgggaaaaagattgttgaaaaatgttataacaatccacttgctataacggtggtaggaagtcttctttatggagaggagataagtaagtggcggtcatttgaaatgagtgagttggccaaaattggcaatggggataataagattttgccgatattaaagctcagttaccataatcttataccctcgttgaagagttgttttagttattgtgcagtgtttcccaaggatcatgaaataaagaaggagatgttgattgaactttggatggcacaaggatatgttgtgccgttggatggaggtcaaagtatagaagatgctgccgaggaacattttgtaattttgttacgaaggtgtttctttcaagatgtaaagaaggataaatatggtgatgttgattctgttaaaatccacgacttgatgcacgatgtcgcccaagaagtggggagggaggaattatgtgtagtgaatgataatacaaagaacttgggtgataaaatccgtcatgtacatcgtgatgtcattagatatgcacaaagagtctctctgtgtagccatagccataagattcgttcgtatattggtggtaattgtgaaaaacgttgtgtggatacactaatagacaagtggatgtgtcttaggatgttggacttgtcaaggtcggatgttaaaaatttgcctaattcaataggtaaattgttgcacttgaggtatcttaacctgtcagataatagaaatctaaagatacttcctgatgcaattacaagactgcataatttgcagacacttcttttagtagattgcagaagtttaaaggagttgccaaaagatttttgcaaattggtcaaactgaggcacttggaattacagggttgtcatgatttgattggtatgccatttggaatggataagctaactagtcttagagtactaccaaaagttgtggtgggtaagaaggaacaaagtgatgatcagctgaaagccctaaaaggcctcaccgagataaaaggctccattgatatcacaatctattcaaagtatagaatagttgaaggcatgaatgacacaggaggagctgggtatttgaagagcatgaaacatctcacgggggttgatattagatttgatgatagagaaggtggatttgttaaccctgaagctgtgttggcaaccctagagccaccttcaaatatcaagagcttatctatacatcgttttgatggtaaaacacttccagtatggggaagagcagagattaattgggcaatctccctctcacatcttgtcgacatccagctttggcattgtcgtaatttgcaggagatgccagtgctgagtaaactgcctcatttgaaatcactggacctttataatttgattagtttagagtacatggagagcacaagcagaagcagtagcagtgacacagaagcagcaacaccagaattaccaacattcttcccttcccttgaaaaacttacactttggcgtctggacaagttgaagggttttgggaacaggagatcgagtagttttccccgcctctctgaattggaaatctgggaatgcccagatctaacgtcatttccttcttgtccaagccttgaagagttggaattggaagaaaacaatgaagcgttgcaaataatagtaaaaataacaacaacaagaggtaaagaagaaaaagaagaagacaagaatgctggtgttggaaattcacaagatgatgacaatgtcaaattatggacggtggaaatagacaatctgggttatctcaaatcactgcccacaaattgtcttactcacctcgaccttacaataagagattccaaggagggggagggtgaatgggaagttggggatgcatttcagaagtgtgtatcttctttgagaagcctcaccataatcggaaatcacggaataaataaagtgaagagactgtctggaagaacagggttggagcatttcactctgttggactcactcaaattttcaaagatagaagaccaggaagatgagggcgaagacaacatcatattctggaaatcctttcctcaaaacctccgcagtttgagaattgaagactctgacaaaatgacaagttttcccatggggatgcagtacttaacctccctccaaaccatccatctttatgattgttataaattgaattccattccagaatggataagcagcttatcatctcttcaatccctgcacataggaaaatgtccagccctaaaatcactaccagaagcaatgcggaacctcacctcccttcagagacttacgatatggcagtgtccagacctaattgaaagatgcaaagaacctaacggggaggactatcccaaaattcaacacatccccaaaattgacatggattga

SEQ ID NO: 23 - protein, 1153 aa, Spinacia oleracea
MAEIGYSVCAKLIEVIGSELIKEICDTWGYKSLLEDLNKTVLTVRNVLIQAGVMRELTSEQQGFIADLKDVVYDADDLFDKLLTRAERKQIDGNEISEKVRRFFSSSNKIGQAYYMSRKVKEIKKQLDEIVDRHTKFGFSAEFIPVCRGRGNERETRSYIDVKNILGRDKDKNDIIDRLLNRNGNEACSFLTIVGAGGLGKTALAQLVFNDERVKIEFHDLRYWVCVSDQDGGQFDVKEILCKILEVVTKEKVDNSSTLELVQSQFQEKLRGKKYFLVLDDVWNEDREKWLPLEELLMLGQGGSKVVVTTRSEKTANVIGKRHFYTLECLSPDYSWSLFEMSAFQKGHEQENHHELVDIGKKIVEKCYNNPLAITVVGSLLYGEEISKWRSFEMSELAKIGNGDNKILPILKLSYHNLIPSLKSCFSYCAVFPKDHEIKKEMLIELWMAQGYVVPLDGGQSIEDAAEEHFVILLRRCFFQDVKKDKYGDVDSVKIHDLMHDVAQEVGREELCVVNDNTKNLGDKIRHVHRDVIRYAQRVSLCSHSHKIRSYIGGNCEKRCVDTLIDKWMCLRMLDLSRSDVKNLPNSIGKLLHLRYLNLSDNRNLKILPDAITRLHNLQTLLLVDCRSLKELPKDFCKLVKLRHLELQGCHDLIGMPFGMDKLTSLRVLPKVVVGKKEQSDDQLKALKGLTEIKGSIDITIYSKYRIVEGMNDTGGAGYLKSMKHLTGVDIRFDDREGGFVNPEAVLATLEPPSNIKSLSIHRFDGKTLPVWGRAEINWAISLSHLVDIQLWHCRNLQEMPVLSKLPHLKSLDLYNLISLEYMESTSRSSSSDTEAATPELPTFFPSLEKLTLWRLDKLKGFGNRRSSSFPRLSELEIWECPDLTSFPSCPSLEELELEENNEALQIIVKITTTRGKEEKEEDKNAGVGNSQDDDNVKLWTVEIDNLGYLKSLPTNCLTHLDLTIRDSKEGEGEWEVGDAFQKCVSSLRSLTIIGNHGINKVKRLSGRTGLEHFTLLDSLKFSKIEDQEDEGEDNIIFWKSFPQNLRSLRIEDSDKMTSFPMGMQYLTSLQTIHLYDCYKLNSIPEWISSLSSLQSLHIGKCPALKSLPEAMRNLTSLQRLTIWQCPDLIERCKEPNGEDYPKIQHIPKIDMD

SEQ ID NO: 24 - DNA, 6266 bp, Spinacia oleracea
atggccgaaatcggatactcggtttgtgcgaaactcatcgaagtgattggcagtgagctgatcaaagagatttgtgacacatggggttacaaatctcttcttgaggacctcaacaaaactgtattgacggtcaggaacgttctcattcaagccggggtgatgcgggagcttactagtgaacaacaaggtttcattgcagaccttaaagatgttgtttatgatgctgatgacttgttcgacaagttactcactcgtgctgagcgaaaacagattgatggaaacgaaatctctgaaaaggtacgtcgtttcttttcctctagtaacaagatcggtcaagcttactacatgtctcgtaaggttaaggaaattaagaagcagttggatgaaattgttgataggcatacaaaatttgggtttagtgctgagtttatacctgtttgtaggggaagggggaacgagagggaaacacgttcatatatagatgtcaagaatattcttgggagggataaagataagaatgatatcatagataggttgcttaatcgtaatgataatgaagcttgtagtttcctgaccatagtgggagcgggaggattgggaaaaactgctcttgcccaacttgtgttcaatgatgaaagggtcaaaattgagtttcatgatttgaggtattgggtttgtgtctctgatcaagatgggggccaattttatgtgaaagagatcctttgtaagattttagagatggttactaaggagaaagttgataatagttccgcattggaattggtacaaagccaatttcaagagaagttaagaggaaagaagtacttccttgttcttgatgatgtatggaacgaggatcgtgagaagtggtttcaattggaagagttgttaatgttgggtcaagggggaagcaaggttgtagtgaccgcacgttcagagaagacagcaaatgtcatagggaaaagacatttttatacactggaatgtttgtcgccagattattcatggagcttatttgaaatgtcggcttttcagaaagggcatgagcaggaaaaccatgacgaactagttgatattgggaaaaagattgttgaaaaatgttataacaatccacttgctataacggtggtaggaagtcttctttatggagaggagataagtaagtggcggtcatttgaaatgagtgagttggccaaaattggcaatggggataataagattttgtcgatattgaagctcagttactacaatcttgcaaactctttgaagagttgttttagttattgtgcagtgtttcccaaggatcatgaaataaagaaggagatgttgattgaactttggatggcacaaggatatgttgtgccgttggatggaggtcaaagtatagaagatgctgccgaggaacattttgtaattttgttacgaaggtgtttctttcaagatgtaaagaaggataaatatggtgatgttgattctgttaaaatccacgacttgatgcacgatgtcgcccaagaagtggggagggaggaaatatgtgtagtgaatgataatacaaagaacttgggtgataaaatccgtcatgtacatggtgatgtcaatagatatgcacaaagagtctctctgtgtagccataagattcgttcgtatattggtggtaaatgtgaaaaacgttgggtggatacactaatagacaagtggatgtgtcttaggatgttggacttgtcaaggtcggatgttaaaaatttgcctaattcaataggtaaattgttgcacttgaggtatcttaacctgtcagataatagaaatctaaagatacttcctgatgcaattacaagactgcataatttgcagacacttcttttagtagattgcagaagtttaaaggagttgccaaaagatttttgcaaattggtcaaactgaggcacttggaattacagggttgtcatgatttgattggtatgccatttggaatggataagctaactagtcttagagtactaccaaaagttgtggtgggtaagaaggaacaaagtgatgatcagctgaaagccctaaaaggcctcaccgagataaaaggctccattgatatcacaatctattcaaagtatagaatagttgaaggcatgaatgacacaggaggagctgggtatttgaagagcatgaaacatctcacgggggttgatattagatttgatgatagagaaggtggatttgttaaccctgaagctgtgttggcaaccctagagccaccttcaaatatcaagagcttatctatacatcgttttgatggtaaaacacttccagtatggggaagagcagagattaattgggcaatctccctctcacatcttgtcgacatccagctttggcattgtcgtaatttgcaggagatgccagtgctgagtaaactgcctcatttgaaatcactggaactttataatttgattagtttagagtacatggagagcacaagcagaagcagtagcagtgacacagaagcagcaacaccagaattaccaacattcttcccttcccttgaaaaacttacactttggggtctggaaaagttgaagggtttggggaacaggagatcgagtagttttccccgcctctctaaattggaaatctgggaatgccctgatctaacgtcatttccttcttgtccaagccttgaagagttggaattggaagaaaacaatgaagcgttgcaaataatagtaaaaataacaacaacaagaggtaaagaagaaaaagaagaagacaagaatgctggtgttggaaattcacaagatgatgacaatgtcaaattatggacggtggaaatagacaatctgggttatctcaaatcactgcccacaaattgtcttactcacctcgaccttacaataagagattccaaggagggggagggtgaatgggaagttggggatgcatttcagaagtgtgtatcttctttgagaagcctcaccataatcggaaatcacggaataaataaagtgaagagactgtctggaagaacagggttggagcatttcactctgttggactcactcaaattttcaaagatagaagaccaggaagatgagggcgaagacaacatcatattctggaaatcctttcctcaaaacctccgcagtttgagaattgaagactctgacaaaatgacaagtttgcccatggggatgcagtacttaacctccctccaaaccctctatctacaccattgttatgaattgaattcccttccagaatggataagcagcttatcatctcttcaatccctgcacataggaaaatgtccagccctaaaatcactaccagaagcaatgcggaacctcacctcccttcagagacttacgatatggcagtgtccagacctaattgaaagatgcaaagaacctaacggggaggactatcccaaaattcaacacatccccaaaattgtaagtcattgcagaaagtaatttattcatttatatttattttatgcttagaatgatatacgcagtcgtcctttggtttccaatcttgaatttggtttttgttttctttctttgtttctttattcaacaccagtccatttatgattgattcattaaaaaaaggatggagttttatggatttgaagaagacaacgaattgagattcctggggttttttttttcgttggggttggttttcatgtatatgttgctgattaaataccagactgatgatgatgatgtgtttatgggttttaaatcagattaaatatatgggaaatgtaagttaattggggatgcacataaggtgtttgatgaaatgtctatgagaaatgttgtttcttggacttagaatgatatacactgtcgtcctttggtttccaatcttacatttggtttgtgttttcttagtttgtttctttaatcaacaccagcccattttttttaaactacctgcaactactaattttcatttaccctgtatctcaggaaatatggtagtaattctcatttactcaacactagcttgatcctgaacgcagccaaccttcaggttagaatccgccttactcatccttttgtcatgcattgttttaagttgttttgcttgcttgtgtaatcataattcatagtatacgattcatcattcactatgtctacaggcaagatattggaattgttcacgattccctgaagtttctttgtttttgttgataccaccatattgcagcttatagtgactaagttaatgaatgtttccaaaaaattagtcatataaattcttcttctctctctattacataaactctttttctctttctaacttatcatgttcatgcctaaaacttatacatgctcacatcattgttcgtttgagctgacttacttctgtaagagagctatctagttaacaactcttgtaactttttatttgctagtcagaacatggattggtgcaagcatgggaatttgctaacactctaccaaatcgattggagtttagacttagtttcaccagaagccatacccggacacttactggggactgtcaacaaagccgcattgtgatgtacttggatgtttcacgtgcctgaggtgcgagttacttggaagggaagcggtttatttaattgttttccgaagtagattttgcttacaagcttttacttttcccttgaaagggtttttcttgttttaagcttttcgaattagagtttcggttgcattaagagtagtcgtattagtcttttttacctaagactcttttttgtaattttcagactatgcaattcaagttttcgagtgttttcttgcttgtgtgattgtgagttggtgaattcgtctttcatacattttgagattatcagaagctttatgctccaccggtagtctagtaccttttctgttactgtacgtgcagggaagtaatctggtaccttctatatatatggaaaaacatacattatacattatgcaaaattcttacaggttagttacttcctggaacttcatttacactttgttttttttgttccattccctcggaagactattccctctgagaaatatgtaatgaacttctgtatgttgctgtttggttcctgttttaatcttcaattttcttgtatagttacagctgcatttacaatgaagtttaagcagacactctctttatatagtgcttctttctggagcaccgtagagctgtctgtggttgatcaccatctgctgccgagagattcagcaatcgcatgtttgatcaggtaaaagtttttatgtcaatgtgtttttttttccgtttgatcaatttatgtctgtattcagattcttatcttcttatagtagcataacacattgtttctttcatttatgtaaactgtttcaagattacagagatgtatgcttcagtcgacattgatgataacttaagatggcattcctacaacagttgcaggcgcattctaactccggcaattctagttaggcaagaggagcattgccaatacctgccacctctgggatttactataccagggttgaagtttatggaagacaccagctatgcacaagccttcaaggggtcatcctacataacaagttgaaccaaccaattgcttgttggtttagtggtaattggagctgaatttggtagggatggcccgtgttcgatccccacaacaacaattgggaggggactggaacctatccacacagaactcgccctgaatccggattagtcctaagggtgaacggggtgctaacaccaaaaaaaaaaacataacaagttgaaccaaacatactttgtttgaattgaagatttagtgatttcatttgatcgattgagatgtcttattataagcgtatatgctcttggatttggccacttaggtgttgtttgacaattggtcattaactcgcttttatattttcttttctcttaggaaaggtgatcctgataatttatattggaacactttttttttctctcactagctttaaaaaagtgttctgtgttacctgcaattcaatttgattatttttcacatagttttacctgaaaaagtgttacctgaaaatcaactgacataagtttttgtttggatccaattaaggacactagataaaccggaataaataatcaaccaattaagtacttcataattaaatatgaagtgtattattatcttatgcttgtgacattgaaggatgttatgatattttaactcaataccttgcaaaatatactggttaaatttcttaacaaggtaacttggcaacaaatt

SEQ ID NO: 25 - DNA, 2000 bp, Spinacia oleracea; identical to SEQ ID NO: 13

SEQ ID NO: 26 - DNA, 3456 bp, Spinacia oleracea
atggccgaaatcggatactcggtttgtgcgaaactcatcgaagtgattggcagtgagctgatcaaagagatttgtgacacatggggttacaaatctcttcttgaggacctcaacaaaactgtattgacggtcaggaacgttctcattcaagccggggtgatgcgggagcttactagtgaacaacaaggtttcattgcagaccttaaagatgttgtttatgatgctgatgacttgttcgacaagttactcactcgtgctgagcgaaaacagattgatggaaacgaaatctctgaaaaggtacgtcgtttcttttcctctagtaacaagatcggtcaagcttactacatgtctcgtaaggttaaggaaattaagaagcagttggatgaaattgttgataggcatacaaaatttgggtttagtgctgagtttatacctgtttgtaggggaagggggaacgagagggaaacacgttcatatatagatgtcaagaatattcttgggagggataaagataagaatgatatcatagataggttgcttaatcgtaatgataatgaagcttgtagtttcctgaccatagtgggagcgggaggattgggaaaaactgctcttgcccaacttgtgttcaatgatgaaagggtcaaaattgagtttcatgatttgaggtattgggtttgtgtctctgatcaagatgggggccaattttatgtgaaagagatcctttgtaagattttagagatggttactaaggagaaagttgataatagttccgcattggaattggtacaaagccaatttcaagagaagttaagaggaaagaagtacttccttgttcttgatgatgtatggaacgaggatcgtgagaagtggtttcaattggaagagttgttaatgttgggtcaagggggaagcaaggttgtagtgaccgcacgttcagagaagacagcaaatgtcatagggaaaagacatttttatacactggaatgtttgtcgccagattattcatggagcttatttgaaatgtcggcttttcagaaagggcatgagcaggaaaaccatgacgaactagttgatattgggaaaaagattgttgaaaaatgttataacaatccacttgctataacggtggtaggaagtcttctttatggagaggagataagtaagtggcggtcatttgaaatgagtgagttggccaaaattggcaatggggataataagattttgtcgatattgaagctcagttactacaatcttgcaaactctttgaagagttgttttagttattgtgcagtgtttcccaaggatcatgaaataaagaaggagatgttgattgaactttggatggcacaaggatatgttgtgccgttggatggaggtcaaagtatagaagatgctgccgaggaacattttgtaattttgttacgaaggtgtttctttcaagatgtaaagaaggataaatatggtgatgttgattctgttaaaatccacgacttgatgcacgatgtcgcccaagaagtggggagggaggaaatatgtgtagtgaatgataatacaaagaacttgggtgataaaatccgtcatgtacatggtgatgtcaatagatatgcacaaagagtctctctgtgtagccataagattcgttcgtatattggtggtaaatgtgaaaaacgttgggtggatacactaatagacaagtggatgtgtcttaggatgttggacttgtcaaggtcggatgttaaaaatttgcctaattcaataggtaaattgttgcacttgaggtatcttaacctgtcagataatagaaatctaaagatacttcctgatgcaattacaagactgcataatttgcagacacttcttttagtagattgcagaagtttaaaggagttgccaaaagatttttgcaaattggtcaaactgaggcacttggaattacagggttgtcatgatttgattggtatgccatttggaatggataagctaactagtcttagagtactaccaaaagttgtggtgggtaagaaggaacaaagtgatgatcagctgaaagccctaaaaggcctcaccgagataaaaggctccattgatatcacaatctattcaaagtatagaatagttgaaggcatgaatgacacaggaggagctgggtatttgaagagcatgaaacatctcacgggggttgatattagatttgatgatagagaaggtggatttgttaaccctgaagctgtgttggcaaccctagagccaccttcaaatatcaagagcttatctatacatcgttttgatggtaaaacacttccagtatggggaagagcagagattaattgggcaatctccctctcacatcttgtcgacatccagctttggcattgtcgtaatttgcaggagatgccagtgctgagtaaactgcctcatttgaaatcactggaactttataatttgattagtttagagtacatggagagcacaagcagaagcagtagcagtgacacagaagcagcaacaccagaattaccaacattcttcccttcccttgaaaaacttacactttggggtctggaaaagttgaagggtttggggaacaggagatcgagtagttttccccgcctctctaaattggaaatctgggaatgccctgatctaacgtcatttccttcttgtccaagccttgaagagttggaattggaagaaaacaatgaagcgttgcaaataatagtaaaaataacaacaacaagaggtaaagaagaaaaagaagaagacaagaatgctggtgttggaaattcacaagatgatgacaatgtcaaattatggacggtggaaatagacaatctgggttatctcaaatcactgcccacaaattgtcttactcacctcgaccttacaataagagattccaaggagggggagggtgaatgggaagttggggatgcatttcagaagtgtgtatcttctttgagaagcctcaccataatcggaaatcacggaataaataaagtgaagagactgtctggaagaacagggttggagcatttcactctgttggactcactcaaattttcaaagatagaagaccaggaagatgagggcgaagacaacatcatattctggaaatcctttcctcaaaacctccgcagtttgagaattgaagactctgacaaaatgacaagtttgcccatggggatgcagtacttaacctccctccaaaccctctatctacaccattgttatgaattgaattcccttccagaatggataagcagcttatcatctcttcaatccctgcacataggaaaatgtccagccctaaaatcactaccagaagcaatgcggaacctcacctcccttcagagacttacgatatggcagtgtccagacctaattgaaagatgcaaagaacctaacggggaggactatcccaaaattcaacacatccccaaaattgaaatatggtag

SEQ ID NO: 27 - protein, 1151 aa, Spinacia oleracea
MAEIGYSVCAKLIEVIGSELIKEICDTWGYKSLLEDLNKTVLTVRNVLIQAGVMRELTSEQQGFIADLKDVVYDADDLFDKLLTRAERKQIDGNEISEKVRRFFSSSNKIGQAYYMSRKVKEIKKQLDEIVDRHTKFGFSAEFIPVCRGRGNERETRSYIDVKNILGRDKDKNDIIDRLLNRNDNEACSFLTIVGAGGLGKTALAQLVFNDERVKIEFHDLRYWVCVSDQDGGQFYVKEILCKILEMVTKEKVDNSSALELVQSQFQEKLRGKKYFLVLDDVWNEDREKWFQLEELLMLGQGGSKVVVTARSEKTANVIGKRHFYTLECLSPDYSWSLFEMSAFQKGHEQENHDELVDIGKKIVEKCYNNPLAITVVGSLLYGEEISKWRSFEMSELAKIGNGDNKILSILKLSYYNLANSLKSCFSYCAVFPKDHEIKKEMLIELWMAQGYVVPLDGGQSIEDAAEEHFVILLRRCFFQDVKKDKYGDVDSVKIHDLMHDVAQEVGREEICVVNDNTKNLGDKIRHVHGDVNRYAQRVSLCSHKIRSYIGGKCEKRWVDTLIDKWMCLRMLDLSRSDVKNLPNSIGKLLHLRYLNLSDNRNLKILPDAITRLHNLQTLLLVDCRSLKELPKDFCKLVKLRHLELQGCHDLIGMPFGMDKLTSLRVLPKVVVGKKEQSDDQLKALKGLTEIKGSIDITIYSKYRIVEGMNDTGGAGYLKSMKHLTGVDIRFDDREGGFVNPEAVLATLEPPSNIKSLSIHRFDGKTLPVWGRAEINWAISLSHLVDIQLWHCRNLQEMPVLSKLPHLKSLELYNLISLEYMESTSRSSSSDTEAATPELPTFFPSLEKLTLWGLEKLKGLGNRRSSSFPRLSKLEIWECPDLTSFPSCPSLEELELEENNEALQIIVKITTTRGKEEKEEDKNAGVGNSQDDDNVKLWTVEIDNLGYLKSLPTNCLTHLDLTIRDSKEGEGEWEVGDAFQKCVSSLRSLTIIGNHGINKVKRLSGRTGLEHFTLLDSLKFSKIEDQEDEGEDNIIFWKSFPQNLRSLRIEDSDKMTSLPMGMQYLTSLQTLYLHHCYELNSLPEWISSLSSLQSLHIGKCPALKSLPEAMRNLTSLQRLTIWQCPDLIERCKEPNGEDYPKIQHIPKIEIW

SEQ ID NO: 28 - DNA, 7286 bp, Spinacia oleracea
atggctgaaatcggatactcggtttgttcaaaacttattgaagtgatgggcagtaagatcattaaagagatttgcgacatgtggggttacaaatctcatcttgaagacctcaacaaatctgtcttgacgatcaaggatgtgctcttggatgctgaggcgaagcgggatctttcccgtgaacaacagagttacattgcagaacttaaggatgttgtttacgatgctgatgatttgttcgatgagttcctcactcttgctgagctcaaacagattgatggcaacaacaagggtggtggtaaattctccaaaaaggtacgtcgtttcttttcttctaataaggagaagatgggtcaagcttacaagatgtctcatatggttaaagaaattaagaagcagttgggtgaaattgttgataggtataccaaatttgggtttattgttgattataaacctattattaggagaagggaggaaacatgttcttattttgtaggtgccaaggagattgttgggagggataaggataaagatgttatcataggcatgttgctagatcatgataacgattgtagtttcttggctgttgtgggggttggaggggtgggaaaaactactcttgcccaacttgtgtataatgatgaaagagtcaaaagtgagttccaagatttgaggtattgggtttgtgtctctgatcaagatgggggacaatttgatgacaaaagaattctttgtaagattatagagttagttacgggccagattcctccgagtaacgagagcatggaatcggtgcgtaagaaatttcaagaggaattaggaggaaagaagtacttccttgttcttgatgatgtatggaacgaggatcgccagaagtggcttcatctagaaaatttcttgaaattgggtcaagggggaagcaagattgtggtaaccacacgttcagagaagacggcaaatgttatagggaaaagacaagactataaactagaatgtttgtcagcagaggattcatggcgcttatttgaaatgtcagcttttgacgaagggcatggccaggaaaactatgacgaattagtgacgattggcaagaagattgttgaaaaatgttataacaatccacttgctataacagtggtaggaagccttctttttggacaagagataaataagtggcggtcgtttgaaagcagtggattagcccaaattgccaatggtgataatcagattttcccgatattaaagctcagttaccacaatcttccacactccttgaagagctgctttagctattgtgcagtgtttcccaaagataatgaaataaagaaggagatgttgattgatctttggatagcacaaggatacattataccgttggatggaggtcaaagtatagaagatgctgccgaggaacattttgtaattttgttaagaagatgtttctttcaagatgtaaagaaggattctcttggtaatgttgattatgttaaaatccacgacttaatgcacgatgtcgctcaagaagtggggaaggaggaaatctgtgtagtgacttcaggtacaaagaagttggctgataaaatccgtcacgtgggttgtgttgtcgatagagatccagaaatagtctttttatgtagcaataagattcgttcgtatattagcggtcgttgtataaagaatccggtggattcacaaatagacaactggatgcgccttagggtgttggacttgtcagattcatgtgttaaagatttgtctgattcaataggtaagctgctgcacttaaggtatcttaacctctcttctaatataaagttggagataatccctgatgcaattacaagactgcataacttgcagacactacttttagaatattgcagaagtttaaaggagttgccaaaagatttttgcaaattggtcaaactgagacacttggatttaaggggttgtcagtgtttgattggtatgccattgggaatggataggctaattagtcttagagtactaccaaaagttgtggtgggtaagaaggaacaaagtgatgatcagctgaaagccctaaaaggcctcaccgagataaaaggctccattgatatcacaatctattcaaagtatagaatagttgaaggcatgaatgacacaggaggagctgggtatttgaagagcatgaaacatctcacgggggttgatattagatttgatgatagagaaggtggatgtgttaaccctgaagctgtgttggcaaccctagagccaccttcaaatatcaagaggttagagatgtggcattacagtggtacaacaattccagtatggggaagagcagagattaattgggcaatctccctctcacatcttgtcgacatccagcttagtttttgtagaaatttgcaggagatgccagtgctgagtaaactgcctcatttgaaatcactggaacttacagagttggataacttagagtacatggagagtagaagcagcagcagtagcagtgacacagaagcagcaacaccagaattaccaacattcttcccttcccttgaaaaactttcactttggggtctggaaaagttgaagggtttggggaacaggagatcgagtagttttccccgcctctctaaattggaaatctgggaatgcccagatctaacgtcatttccttcttgtccaagccttgaaaagttggaattgaaagaaaacaatgaagcgttgcaaataatagtaaaaataacaacaacaagaggtaaagaagaaaaagaagaagacaagaatgctggtgttggaaattcacaagatgatgacaatgtcaaattatggaaggtggaaatagacaatctgggttatctcaaatcactgcccacaaattgtcttactcacctcgaccttacaataagagattccaaggagggggagggtgaatgggaagttggggaggcatttcagaagtgtgtatcttctttgagaaagctcagcataatcggaaatcacggaataaataaagtgaagagactgtctggaagaacagggttggagcatttcactctgttggactcactcgaactttcaaatatagaagaccaggaagatgagggcgaagacaacatcatgttctggaaatcctttcctcaaaacctccgcaatttggaaattaattactctgacaaaatgacaagttttcccatggggatgcagtacttaacctccctccaaaccatccatctttatgattgttataaattgaattccattccagaatggataagcagcttatcatctcttcaatccctgcacataggaaaatgtccagccctaaaatcactaccagaagcaatgcggaacctcacctcccttcagagacttacgatatggcagtgtccagacctaattgaaagatgcaaagaacctaacggggaggactatcccaaaattgtaagtcattgcagaaagtaatttattcatttatatttattttatgcttagaatgatatacaccgtcgtcctttggtttcaaatcttgaatttggtttttgttttctttctttgtttctttattcaacaccagcccatttatgattgattcattaaaaaaaggatggagttttgtggatttgaagaagacaacgaattgagattcctggggttttctttttgttggggttggatttcatgtatatgttgctgattaaatacgagactgatgatgatgatgatgtgtttatgggttttaaatcagattaaatatatgggaaatgtaagttaatttgggatgcacataaggtgtttgctgaaatgtctatgagaaatgttgtttcttggacttagaatgatatacactgtcgtccattggtttccaatcttacatttggtttgtgttttcttagtttgtttctttaatcaacaccaacccatttttttaaaactacctgcaactactaatttacgttgaccctgtatctcaggtactaaatgaatattggtgattttcagttactcaacactagcttgatcctgaacgcacccaaccttcaggttagaatccggcttactcatccttttgtccagttttcaagtaattgttttggcaggatcaattctctaattgttgtacaccgtatattgcaatttatagtgactacagttaatgaatgtttacaaaaaattagtcatgtaaaaacttcttctctgtccattacataaactctttttctctttctaacttatcatgttcatgtctaaaaaattaaacatgctcacatcaatgttcatttaagctaacttacttctgtaagagagcgagctagttaaaaactcctttaactttctgttttatactcaggacatggattgatgcaagcatgaagaacttcgggaatttgctaaaactctaccaaagcgatgagagtttggactttgtttcacttgaagtcagggactgtcaacaaagccacagtgtgcatgttggctgtttcacttggacgataaaaaggtttatttaattgttttcctaagtgtatttggcttacaagcttttacttttcgcttgaaagggtttttcttgttttaagctttttgaattagagtttcggttgaagtaagagtagtcgtattagtcttttactttgcaggagtctatgcctatataaggtaagactcgtatttgtaattttcagattatgcaattcaagttttcgagtgttttcttaaaaaaacatatcatacctgtgtgtagcataaagataaattctgatgctgtgcttcttgttatggctcacattggttttcattgtttggattgtttcacagggaagcagagaatacctggaacctgtaaaggacgctatatctatagcagctttcacaggccaagtaatataatgttctttatcaatcactcaatacctggagattgtttgaacacataattcacctctttttttccatctcaaattgcagacttttactgggatttgaatgacagcaaacatttgattgtcacgaggattgatctaactggtgaatgttgtgatcaccatattggtctttctcattcaaacaaacttgcataccgttcttttgaagtttgaagacaagcaggcgataatcaactcaggtcgaagctcatgtgcaggagagaatagaatatagaggagattatttttaaaagaaacgctcaaaggtattgtagcacctttcctatttgctactgcagtgatgtttttatttcttgtttgcagcgcttgtttctcatatttcaacctacttttagaaaaaaaaacatctccgaacataaccaaaaataaagttcccttatcagtgctttccctgctttcttctaaacaacatatacaattataaaccctttttctctcttacctttgttattcttccttgcttcattgagataacactctcctgtttttgttttgttgttagtcattacatggatatatcaaggacaacagttctgtagtccgtcaactgtggttaggaaggctaaactggagcacaataaccccatgtcaattgaatagtaaaggtgtgctatatcagtttcgtttggcttggcttacctgaaaaatggctggttatttatccttgtctctttctatgacgtgcagtggcttgttaatgtgtctcggacaacaattcctcactttccaagttccatacacgctgatgtaactatcttctgcagtctgttctttcatttttgccacgtgctctaattataactttttgtactcaataatcaactccttgtcccggtatttgcagagactacttaaacaggtaaagtgacaatcctggcgaagttgtctgtttcttagctctgaacccatcattcaggtaagattaagtatttaagaagaaattttgtttttacctaaaatgaatgatcttgtgtaactgcttgcttcttgcattaaataagaactttctgctgcatatgtgacagttacatccacaaaaaagttggaggtttgttcagggattggaaatgaaggtacttcagaattcctggaatgtttatgaatgctccagacttcagagtctttaatggaaaattcgagtcactaaaaaaacattattcctatcatcagagctttgaagttcctctatacaaggtcaactgagttcctctttgcctcttgtttaattgtatttacttgtaccttaattataatctgtatattgttttagttaagttctaaaacaggttattattcatcatttgtgcagcatattgctggaatcaagaatctagtgcttcttcttcctgacttcactgtcaaaatagcagttcccatgctggaaataagcgcgctagcaatgtaattgatgacatggatgttgctgcttctgagttttgatcataaaaagctgttatgtgtttcttgaatgtaatgaaggagaggagaaaactgaaaactcttggcaaaaacgtgaaattgcagtgcctcggggtggtagggatcacccggattcagttcagacgatacttttttcaacccggtttgttccggttttcagcttcgggttttccttgtacttttggggcacacatacaaggctacttcatgtttgagaaacctaattgaggctatcttgtagcaaatgcacaccacactctttctctcttctctccttttttcaccttccatttgtaaaaatcctcttttaaaggttaataaaaaaaagcttcaagtctcgtagggtggatgtaggtcacattgaccgaaccacggtaaactctttgtgttctttcttctctctttgtttctcatttttacggcaagtgtttatggttaaccatgcatcttagaatagcttaaggcattaacataataacatcaatgttctccaaagattcaccttacttgttgtacataatcacaatgttaagcctatgaaggtagaatgctctcatgatttggtttaaccaaaaaataaactctaaaataatacggagtaataaaaattggccataaattatttacaaagtttgatttttgtatagggtatcttgtacttgtgataaaaaaaattaaaaaaaaaaaaattacttatttcttctatttttacttgttacacttttctacaacagaaacatcaaaacgcccgcaacacactataaatgaaaaaccattttgtatgcaatgatatttacgttctcactttattctctttaataactcctactacgtaattctcaccaatcaaataaaattatagaaattttcatttataccctcttaaaatgatgttgatttcttttttttttt

SEQ ID NO: 29 - DNA, 2000 bp, Spinacia oleracea
tggtccacaactccacactaagaggaactccaatgcttagttacaaggtggtgtagttaaaaagtaactccaatagttaactacacggtattatagttaaatttgccaactcaaatttctaactacaatatatttaagctacaaagtttctcattggctgactacaatacgttgtagcgccttataatattttattcaatatacaattttatttattttacctttttaacaatttttttttgatctacctgctgtcctgttcatatgagctacactaatttgatagctgcttacgcaattcttatatcaacggttggctacttgttcaaatatttttatttttttacgagtaagtcattttatgatcattgaagtggctctattattattatcatgcaccgattaacgcaagaataattaactcggtacgaattagtttcaaaataaaatccctcaaaaaaaaaagtttcaaaataaaattaacagaaaaccaaccttctccggtttactgttgttagagcatggaattttccagtaatcgcagaccccaaattatcttccagttgaatcaatccttgatttttggatttgccagaaaactccttgaattttagggttcatatttgatccgtaattgggaaaattttcagcaattgatcttccaaatcagccctacttgtttccagactgcaaatgaaaggtgcgaactttatactgcattttggttttccattagtgtaatttattaagatgaactgcattttgcaattgttttattcgactactcatttttaaatcaaattgcttaattgctagttagttttcttatcatattgccaaaaaaaattatttttgtttaattggtgaaaaagggtaaattatacctagtgtacaagattttcttgcacaccacccttaatttgttgacacatcatcaaacgtactgaaaaatgagaatgaaagacaataaatatgtcattttaaccaatagaaaaacatgatgtagtaagatccttaattgatagataaataattaaatatcagtccattagttgaatattcaatgaaaatgtatggtccaaaaatggcgtttaatagtcaatgtcatgctttatggggtggtggagtactatgtgactgtgtgtggacttggagaagactagagagtatgattatcaacctatggaccctcaaaatgaaaatgaaaatgatgtttttacactttaaaatcgtcaagaaacaacaatcctttttagcaatagtatttacacgcgctagttgcacgaactttaatgcaaatagtataaatttacggtcaaagttttcatactttagacacatactctctccgtcccttaatactcgcaccgctttccttttcgggccgtcccttaatacttgcaccgcttctataaatggaaatctatttctcacaattacctactaacccacctacactcatcgtccctacaaaaaatcatttaaaaattcacaccccacactcaccactcctcacccattacacatttcctactaactatattaaaaaaatatcccactataaactaacactcattaaattaataagtcaattcaaatatcttaaactccgcaccggtcaaatcggtgcgagtattaagggacggagggagtattatagagtgtaaataactttcatgaatggagggagtaaaaaattgttttacttggctaaaatacttttgttcttattggcagataaacatgagtccattattggccaacttgaacatatacctccaaacaataatcaatgatgtcgattatgaagtttgtgaatgcaatttattatcactttcattgcaagttgtcatctgtgctgagtgttgatttataaaaaggactacttgattaacacatacaatattactccacctttctccagacaacctttcttttctgcttttatcttgttttctcatcttaattcatctcttcatctttctgaaaaacccaaccca

SEQ ID NO: 30 - DNA, 3453 bp, Spinacia oleracea
atggctgaaatcggatactcggtttgttcaaaacttattgaagtgatgggcagtaagatcattaaagagatttgcgacatgtggggttacaaatctcatcttgaagacctcaacaaatctgtcttgacgatcaaggatgtgctcttggatgctgaggcgaagcgggatctttcccgtgaacaacagagttacattgcagaacttaaggatgttgtttacgatgctgatgatttgttcgatgagttcctcactcttgctgagctcaaacagattgatggcaacaacaagggtggtggtaaattctccaaaaaggtacgtcgtttcttttcttctaataaggagaagatgggtcaagcttacaagatgtctcatatggttaaagaaattaagaagcagttgggtgaaattgttgataggtataccaaatttgggtttattgttgattataaacctattattaggagaagggaggaaacatgttcttattttgtaggtgccaaggagattgttgggagggataaggataaagatgttatcataggcatgttgctagatcatgataacgattgtagtttcttggctgttgtgggggttggaggggtgggaaaaactactcttgcccaacttgtgtataatgatgaaagagtcaaaagtgagttccaagatttgaggtattgggtttgtgtctctgatcaagatgggggacaatttgatgacaaaagaattctttgtaagattatagagttagttacgggccagattcctccgagtaacgagagcatggaatcggtgcgtaagaaatttcaagaggaattaggaggaaagaagtacttccttgttcttgatgatgtatggaacgaggatcgccagaagtggcttcatctagaaaatttcttgaaattgggtcaagggggaagcaagattgtggtaaccacacgttcagagaagacggcaaatgttatagggaaaagacaagactataaactagaatgtttgtcagcagaggattcatggcgcttatttgaaatgtcagcttttgacgaagggcatggccaggaaaactatgacgaattagtgacgattggcaagaagattgttgaaaaatgttataacaatccacttgctataacagtggtaggaagccttctttttggacaagagataaataagtggcggtcgtttgaaagcagtggattagcccaaattgccaatggtgataatcagattttcccgatattaaagctcagttaccacaatcttccacactccttgaagagctgctttagctattgtgcagtgtttcccaaagataatgaaataaagaaggagatgttgattgatctttggatagcacaaggatacattataccgttggatggaggtcaaagtatagaagatgctgccgaggaacattttgtaattttgttaagaagatgtttctttcaagatgtaaagaaggattctcttggtaatgttgattatgttaaaatccacgacttaatgcacgatgtcgctcaagaagtggggaaggaggaaatctgtgtagtgacttcaggtacaaagaagttggctgataaaatccgtcacgtgggttgtgttgtcgatagagatccagaaatagtctttttatgtagcaataagattcgttcgtatattagcggtcgttgtataaagaatccggtggattcacaaatagacaactggatgcgccttagggtgttggacttgtcagattcatgtgttaaagatttgtctgattcaataggtaagctgctgcacttaaggtatcttaacctctcttctaatataaagttggagataatccctgatgcaattacaagactgcataacttgcagacactacttttagaatattgcagaagtttaaaggagttgccaaaagatttttgcaaattggtcaaactgagacacttggatttaaggggttgtcagtgtttgattggtatgccattgggaatggataggctaattagtcttagagtactaccaaaagttgtggtgggtaagaaggaacaaagtgatgatcagctgaaagccctaaaaggcctcaccgagataaaaggctccattgatatcacaatctattcaaagtatagaatagttgaaggcatgaatgacacaggaggagctgggtatttgaagagcatgaaacatctcacgggggttgatattagatttgatgatagagaaggtggatgtgttaaccctgaagctgtgttggcaaccctagagccaccttcaaatatcaagaggttagagatgtggcattacagtggtacaacaattccagtatggggaagagcagagattaattgggcaatctccctctcacatcttgtcgacatccagcttagtttttgtagaaatttgcaggagatgccagtgctgagtaaactgcctcatttgaaatcactggaacttacagagttggataacttagagtacatggagagtagaagcagcagcagtagcagtgacacagaagcagcaacaccagaattaccaacattcttcccttcccttgaaaaactttcactttggggtctggaaaagttgaagggtttggggaacaggagatcgagtagttttccccgcctctctaaattggaaatctgggaatgcccagatctaacgtcatttccttcttgtccaagccttgaaaagttggaattgaaagaaaacaatgaagcgttgcaaataatagtaaaaataacaacaacaagaggtaaagaagaaaaagaagaagacaagaatgctggtgttggaaattcacaagatgatgacaatgtcaaattatggaaggtggaaatagacaatctgggttatctcaaatcactgcccacaaattgtcttactcacctcgaccttacaataagagattccaaggagggggagggtgaatgggaagttggggaggcatttcagaagtgtgtatcttctttgagaaagctcagcataatcggaaatcacggaataaataaagtgaagagactgtctggaagaacagggttggagcatttcactctgttggactcactcgaactttcaaatatagaagaccaggaagatgagggcgaagacaacatcatgttctggaaatcctttcctcaaaacctccgcaatttggaaattaattactctgacaaaatgacaagttttcccatggggatgcagtacttaacctccctccaaaccatccatctttatgattgttataaattgaattccattccagaatggataagcagcttatcatctcttcaatccctgcacataggaaaatgtccagccctaaaatcactaccagaagcaatgcggaacctcacctcccttcagagacttacgatatggcagtgtccagacctaattgaaagatgcaaagaacctaacggggaggactatcccaaaattgtactaaatgaatattggtga

SEQ ID NO: 31 - DNA, 3486 bp, Spinacia oleracea
atggctgaaatcggatactcggtttgttcaaaacttattgaagtgatgggcagtaagatcattaaagagatttgcgacatgtggggttacaaatctcatcttgaagacctcaacaaatctgtcttgacgatcaaggatgtgctcttggatgctgaggcgaagcgggatctttcccgtgaacaacagagttacattgcagaacttaaggatgttgtttacgatgctgatgatttgttcgatgagttcctcactcttgctgagctcaaacagattgatggcaacaacaagggtggtggtaaattctccaaaaaggtacgtcgtttcttttcttctaataaggagaagatgggtcaagcttacaagatgtctcatatggttaaagaaattaagaagcagttgggtgaaattgttgataggtataccaaatttgggtttattgttgattataaacctattattaggagaagggaggaaacatgttcttattttgtaggtgccaaggagattgttgggagggataaggataaagatgttatcataggcatgttgctagatcatgataacgattgtagtttcttggctgttgtgggggttggaggggtgggaaaaactactcttgcccaacttgtgtataatgatgaaagagtcaaaagtgagttccaagatttgaggtattgggtttgtgtctctgatcaagatgggggacaatttgatgacaaaagaattctttgtaagattatagagttagttacgggccagattcctccgagtaacgagagcatggaatcggtgcgtaagaaatttcaagaggaattaggaggaaagaagtacttccttgttcttgatgatgtatggaacgaggatcgccagaagtggcttcatctagaaaatttcttgaaattgggtcaagggggaagcaagattgtggtaaccacacgttcagagaagacggcaaatgttatagggaaaagacaagactataaactagaatgtttgtcagcagaggattcatggcgcttatttgaaatgtcagcttttgacgaagggcatggccaggaaaactatgacgaattagtgacgattggcaagaagattgttgaaaaatgttataacaatccacttgctataacagtggtaggaagccttctttttggacaagagataaataagtggcggtcgtttgaaagcagtggattagcccaaattgccaatggtgataatcagattttcccgatattaaagctcagttaccacaatcttccacactccttgaagagctgctttagctattgtgcagtgtttcccaaagataatgaaataaagaaggagatgttgattgatctttggatagcacaaggatacattataccgttggatggaggtcaaagtatagaagatgctgccgaggaacattttgtaattttgttaagaagatgtttctttcaagatgtaaagaaggattctcttggtaatgttgattatgttaaaatccacgacttaatgcacgatgtcgctcaagaagtggggaaggaggaaatctgtgtagtgacttcaggtacaaagaagttggctgataaaatccgtcacgtgggttgtgttgtcgatagagatccagaaatagtctttttatgtagcaataagattcgttcgtatattagcggtcgttgtataaagaatccggtggattcacaaatagacaactggatgcgccttagggtgttggacttgtcagattcatgtgttaaagatttgtctgattcaataggtaagctgctgcacttaaggtatcttaacctctcttctaatataaagttggagataatccctgatgcaattacaagactgcataacttgcagacactacttttagaatattgcagaagtttaaaggagttgccaaaagatttttgcaaattggtcaaactgagacacttggatttaaggggttgtcagtgtttgattggtatgccattgggaatggataggctaattagtcttagagtactaccaaaagttgtggtgggtaagaaggaacaaagtgatgatcagctgaaagccctaaaaggcctcaccgagataaaaggctccattgatatcacaatctattcaaagtatagaatagttgaaggcatgaatgacacaggaggagctgggtatttgaagagcatgaaacatctcacgggggttgatattagatttgatgatagagaaggtggatgtgttaaccctgaagctgtgttggcaaccctagagccaccttcaaatatcaagaggttagagatgtggcattacagtggtacaacaattccagtatggggaagagcagagattaattgggcaatctccctctcacatcttgtcgacatccagcttagtttttgtagaaatttgcaggagatgccagtgctgagtaaactgcctcatttgaaatcactggaacttacagagttggataacttagagtacatggagagtagaagcagcagcagtagcagtgacacagaagcagcaacaccagaattaccaacattcttcccttcccttgaaaaactttcactttggggtctggaaaagttgaagggtttggggaacaggagatcgagtagttttccccgcctctctaaattggaaatctgggaatgcccagatctaacgtcatttccttcttgtccaagccttgaaaagttggaattgaaagaaaacaatgaagcgttgcaaataatagtaaaaataacaacaacaagaggtaaagaagaaaaagaagaagacaagaatgctggtgttggaaattcacaagatgatgacaatgtcaaattatggaaggtggaaatagacaatctgggttatctcaaatcactgcccacaaattgtcttactcacctcgaccttacaataagagattccaaggagggggagggtgaatgggaagttggggaggcatttcagaagtgtgtatcttctttgagaaagctcagcataatcggaaatcacggaataaataaagtgaagagactgtctggaagaacagggttggagcatttcactctgttggactcactcgaactttcaaatatagaagaccaggaagatgagggcgaagacaacatcatgttctggaaatcctttcctcaaaacctccgcaatttggaaattaattactctgacaaaatgacaagttttcccatggggatgcagtacttaacctccctccaaaccatccatctttatgattgttataaattgaattccattccagaatggataagcagcttatcatctcttcaatccctgcacataggaaaatgtccagccctaaaatcactaccagaagcaatgcggaacctcacctcccttcagagacttacgatatggcagtgtccagacctaattgaaagatgcaaagaacctaacggggaggactatcccaaaattttactcaacactagcttgatcctgaacgcacccaaccttcaggacatggattga

SEQ ID NO: 32 - protein, 1150 aa, Spinacia oleracea
MAEIGYSVCSKLIEVMGSKIIKEICDMWGYKSHLEDLNKSVLTIKDVLLDAEAKRDLSREQQSYIAELKDVVYDADDLFDEFLTLAELKQIDGNNKGGGKFSKKVRRFFSSNKEKMGQAYKMSHMVKEIKKQLGEIVDRYTKFGFIVDYKPIIRRREETCSYFVGAKEIVGRDKDKDVIIGMLLDHDNDCSFLAVVGVGGVGKTTLAQLVYNDERVKSEFQDLRYWVCVSDQDGGQFDDKRILCKIIELVTGQIPPSNESMESVRKKFQEELGGKKYFLVLDDVWNEDRQKWLHLENFLKLGQGGSKIVVTTRSEKTANVIGKRQDYKLECLSAEDSWRLFEMSAFDEGHGQENYDELVTIGKKIVEKCYNNPLAITVVGSLLFGQEINKWRSFESSGLAQIANGDNQIFPILKLSYHNLPHSLKSCFSYCAVFPKDNEIKKEMLIDLWIAQGYIIPLDGGQSIEDAAEEHFVILLRRCFFQDVKKDSLGNVDYVKIHDLMHDVAQEVGKEEICVVTSGTKKLADKIRHVGCVVDRDPEIVFLCSNKIRSYISGRCIKNPVDSQIDNWMRLRVLDLSDSCVKDLSDSIGKLLHLRYLNLSSNIKLEIIPDAITRLHNLQTLLLEYCRSLKELPKDFCKLVKLRHLDLRGCQCLIGMPLGMDRLISLRVLPKVVVGKKEQSDDQLKALKGLTEIKGSIDITIYSKYRIVEGMNDTGGAGYLKSMKHLTGVDIRFDDREGGCVNPEAVLATLEPPSNIKRLEMWHYSGTTIPVWGRAEINWAISLSHLVDIQLSFCRNLQEMPVLSKLPHLKSLELTELDNLEYMESRSSSSSSDTEAATPELPTFFPSLEKLSLWGLEKLKGLGNRRSSSFPRLSKLEIWECPDLTSFPSCPSLEKLELKENNEALQIIVKITTTRGKEEKEEDKNAGVGNSQDDDNVKLWKVEIDNLGYLKSLPTNCLTHLDLTIRDSKEGEGEWEVGEAFQKCVSSLRKLSIIGNHGINKVKRLSGRTGLEHFTLLDSLELSNIEDQEDEGEDNIMFWKSFPQNLRNLEINYSDKMTSFPMGMQYLTSLQTIHLYDCYKLNSIPEWISSLSSLQSLHIGKCPALKSLPEAMRNLTSLQRLTIWQCPDLIERCKEPNGEDYPKIVLNEYW

SEQ ID NO: 33 - protein, 1161 aa, Spinacia oleracea
MAEIGYSVCSKLIEVMGSKIIKEICDMWGYKSHLEDLNKSVLTIKDVLLDAEAKRDLSREQQSYIAELKDVVYDADDLFDEFLTLAELKQIDGNNKGGGKFSKKVRRFFSSNKEKMGQAYKMSHMVKEIKKQLGEIVDRYTKFGFIVDYKPIIRRREETCSYFVGAKEIVGRDKDKDVIIGMLLDHDNDCSFLAVVGVGGVGKTTLAQLVYNDERVKSEFQDLRYWVCVSDQDGGQFDDKRILCKIIELVTGQIPPSNESMESVRKKFQEELGGKKYFLVLDDVWNEDRQKWLHLENFLKLGQGGSKIVVTTRSEKTANVIGKRQDYKLECLSAEDSWRLFEMSAFDEGHGQENYDELVTIGKKIVEKCYNNPLAITVVGSLLFGQEINKWRSFESSGLAQIANGDNQIFPILKLSYHNLPHSLKSCFSYCAVFPKDNEIKKEMLIDLWIAQGYIIPLDGGQSIEDAAEEHFVILLRRCFFQDVKKDSLGNVDYVKIHDLMHDVAQEVGKEEICVVTSGTKKLADKIRHVGCVVDRDPEIVFLCSNKIRSYISGRCIKNPVDSQIDNWMRLRVLDLSDSCVKDLSDSIGKLLHLRYLNLSSNIKLEIIPDAITRLHNLQTLLLEYCRSLKELPKDFCKLVKLRHLDLRGCQCLIGMPLGMDRLISLRVLPKVVVGKKEQSDDQLKALKGLTEIKGSIDITIYSKYRIVEGMNDTGGAGYLKSMKHLTGVDIRFDDREGGCVNPEAVLATLEPPSNIKRLEMWHYSGTTIPVWGRAEINWAISLSHLVDIQLSFCRNLQEMPVLSKLPHLKSLELTELDNLEYMESRSSSSSSDTEAATPELPTFFPSLEKLSLWGLEKLKGLGNRRSSSFPRLSKLEIWECPDLTSFPSCPSLEKLELKENNEALQIIVKITTTRGKEEKEEDKNAGVGNSQDDDNVKLWKVEIDNLGYLKSLPTNCLTHLDLTIRDSKEGEGEWEVGEAFQKCVSSLRKLSIIGNHGINKVKRLSGRTGLEHFTLLDSLELSNIEDQEDEGEDNIMFWKSFPQNLRNLEINYSDKMTSFPMGMQYLTSLQTIHLYDCYKLNSIPEWISSLSSLQSLHIGKCPALKSLPEAMRNLTSLQRLTIWQCPDLIERCKEPNGEDYPKILLNTSLILNAPNLQDMD

SEQ ID NO: 34 - DNA, 6194 bp, Spinacia oleracea
atggctgaaatcggatactcggtttgttcaaaacttattgaagtgatgggcagtaatatcattaaagagattcgcgacatgtggggttacaattctcatcttgaagacctcaacaaatctgtcttgacgatcaaggatgtgctcttggatgctgaggcgaagcgggatctttcccgtgaacaacagagttacattgcagaacttaaggatgttgtttacgatgctgatgatttgttcgatgagttcctcactcttgctgagctcaaacagattgatggaaacaagggtggtggtaaattctccaaaaaggtacgtcgtttcttttcttctaataaggagaagatgggtcaagcttacaagatgtctcatatggttaaagaaattaagaagcagttgggtgaaattgttgataggtataccaaatttgggtttattgttgattataaacctattattaggagaagggaggaaacatgttcttattttgtaggtgccaaggagattgttgggagggataaggataaagatgttatcataggcatgttgctagatcatgataacgattgtagtttcttggctgttgtgggggttggaggggtgggaaaaactactcttgcccaacttgtgtataatgatgaaagagtcaaaagtgagttccaagatttgaggtattgggtttgtgtctctgatcaagatgggggacaatttgatgacaaaagaattctttgtaagattatagagttagttacgggccagattcctccgagtaacgagagcatggaatcggtgcgtaagaaatttcaagaggaattaggaggaaagaagtacttccttgttcttgatgatgtatggaacgaggatcgccagaagtggcttcatctagaaaatttcttgaaattgggtcaagggggaagcaagattgtggtaaccacacgttcagagaagacggcaaatgttatagggaaaagacaagactataaactagaatgtttgtcagcagaggattcatggcgcttatttgaaatgtcagcttttgacgaagggcatggccaggaaaactatgacgaattagtgacgattggcaagaagattgttgaaaaatgttataacaatccacttgctataacagtggtaggaagccttctttttggacaagagataaataagtggcggtcgtttgaaagcagtggattagcccaaattgccaatggtgataatcagattttcccgatattaaagctcagttaccacaatcttccacactccttgaagagctgctttagctattgtgcagtgtttcccaaagataatgaaataaagaaggagatgttgattgatctttggatagcacaaggatacattataccgttggatggaggtcaaagtatagaagatgctgccgaggaacattttgtaattttgttaagaagatgtttctttcaagatgtaaagaaggattctcttggtaatgttgattatgttaaaatccacgacttaatgcacgatgtcgctcaagaagtggggaaggaggaaatctgtgtagtgacttcaggtacaaagaagttggctgataaaatccgtcacgtgggttgtgttgtcgatagagatccagaaatagtctttttatgtagcaataagattcgttcgtatattagcggtcgttgtataaagaatccggtggattcacaaatagacaactggatgcgccttagggtgttggacttgtcagattcatgtgttaaagatttgtctgattcaataggtaagctgctgcacttaaggtatcttaacctctcttctaatataaagttggagataatccctgatgcaattacaagactgcataacttgcagacactacttttagaagattgcagaagtttaaaggagttgccaaaagatttttgcaaattggtcaaactgaggcacttggaattacagggttgtcatgatttgattggtatgccatttggaatggataagctaactagtcttagaatactaccaaacattgtggtgggtaggaaggaacaaagtgatgatgagctgaaagccctaaaaggcctcatcgagataaaaggctccatttctatcagaatctattcaaagtatagaatagttgaaggcatgaatgacacaggaggagctgcttatttgaagagcatgaaacatctcagggagattgatattacatttttgggtgaatgtgttagccctgaagctgtattggaaaccttagagccaccttcaaatatcaagagcttatatatatataattacagtggtacaacaattccagtatggggaagagcagagattaattgggcaatctccctctcacatctcgtcgacatccagcttagttgttgtagtaatttgcaggagatgccagtgctgagtaaactgcctcatttgaaatcgctgaaacttggatggttggataacttagagtacatggagagtagcagtagcagtgacacagaagcagcaacaccagaattaccaacattcttcccttcccttgaaaaacttactttacagcatctggaaaagttgaagggttttgggaacaggagatcgagtagttttccccgcctctctgaattggaaatcaagaaatgcccagatctaacgtcatttccttcttgtccaagccttgagaagttggaattgaaagaaagcaatgaagcgttgcaaataatagtaaaaataacaacaagaggtaaagaaaaagaagagaacaataatgctggtgttggaaattcacaagatgatgacaaagtcaaattacggaagatggtgatagacaatctgggttatctcaaatcactgcccacaaattgtcttactcaccttgaaattgaggagtttattgaatcagattccgaggaagagattgaatcagaagtcggggaggaggaggttgaattggaagttgtggaggcatttcagaagtctgcatcttctctgcaaagcctcgaaatatacagaataaataaactgaatagactaactggaacaacaggattagtgcatttcagtgccttggacgaactcacattgaattttgtcgacgattttgaagtatcctttcctcaaagcctccgcagtttgaaaattgaatactcttataaaatgacaagtctgcccatggggatgcagtacttaacctccctccaaaccctcgaactaaaatgttgtgatgaattgaattcccttccagaatggataagcaacttatcatctcttcaatccctgtccatatcctactgtgaagccctgaaatcactaccagaagcaatgcagaacctcacctcccttcagagacttgtgataagagaatgtcgagacctagctgaaagatgcgaagaacccaatggggaagactatcacaaaattcaacacatccccaaaattgtaagtgattgcggaaagtgtttcttttatttatttttaattttatgcttagaatgatatacatcagcattcagcgtccattggtttccaatcttacatttggtttttgtttcttagtttgtttctttaatcaacaccagcccattttttttaaactacctgcaactactaattttcatttaccctgtatctcaggaaatatggtagtattctcatttactcaacactagcttgatcctgaacgcagccaaccttcaggttagaatccgccttactcatccttttgtcatgcattgttttaagttgttttgcttgcttgtgtaatcataattcatagtatacgattcatcattcactatgtctacaggcaagatattggaattgttcacgattccctgaagtttctttgtttttgttgataccaccatattgcagcttatagtgactaagttaatgaatgtttccaaaaaattagtcatataaattcttcttctctctctattacataaactctttttctctttctaactatcatgttcatgtctaaaacttatacatgctcacatcattgttcgtttcagctgacttacttctgtaagagagctatctagttaacaactcttgtaacattttatttgctagtcagaacatggattggtgcaagcatgggaatttgccaacactctaccaaatcgattggagtttggacttagtttcaccagaagccatacccggacacttactggggactgtcaacaaagccgcattatgatgtacttggatgtttcacgtgcctgaggtgtgagttacttggaagggaagcggtttatttaattgttttcctaagtagattttgcttagaagcttttacttttcacttgaaagggtttttcttgttttaagcttttcgaattagagtttcggttgcattaagagtagtcgtattagtctttttttacctaaggaagacttttttgtaattttcagacgatgcaattcaacttttcgagtgttttgttgcttgtgtgattgtgagtttgtgaatttgtctttcataaatattgagttcatcagaagctttatgctccaccggtagtctagtaccttttgttattgttcagggaagtaatctggtaccttctatatatatgagaaaacatacattatgcaaaattcttacaggttagttacttcctagaacttcagttatactttttttttgttccatgtccttggaatcaagtcattccctctgaaaaatgtgtactgaacttttgaaagttgctgtttgattcctgtttgaatcttcacttttcttgcatcgtgacagctgtgtttacaatgaagtttaagcagacactctctttatatagtgcctccttttggagcatcggagagttgtggctgatcactatgtgcgaccaagagattcattaatcgcgtgtttgatcaggtaaaagtttttatgtcaatgtgttttatttttctttctgtttgatcagtttatgtctgtattcagattcttatcttcttctagtagcataacaaatttgtttgtttcattatataaaccgtttcaggattacaaatgatcggacagagatgtatgcttcagtcgatattgatgataacttaaggtagtattgctagaacagttacagagctgtggctgatcactatgtgctgcaaacagattcatcaatcacgtgtttgataaggtagagttttcatgtcaacgcgttttttctgtttgatcaatttatgtctgtattcagattcttatctacttctagtagcataacatatctgtttctatcattatataattgtttcagggttacaaatgaccggacagagatgtatgcttcagtcgatattgatgctaacttaagatagcattgctagaacagtttcaggttgccattgaaatttgaaaacagaaagacaccatcaggtagagttttcatgtcaatgctttttttttttttgatcaatttatgtttgtataaaaatttgtatcttcttctatactataaattctatataacgtatctgtttatttcattataataaaccgtttcaggattacaaatgatcgaacagtgatgtatgcttcagtcgataacttcaggtagcattgccagaagaattgcagacacatcctaacttaagagggttatggttgattgactaactctcgaaattctagttaggcaagaggagcattgcagtacctgccttaaaaggggtcgtcttatatagatatctctatcagtagtcatttacgtcttaagtcctgaaataagttgaactaaacatactttgtttgaatcgaagatttagtgaattttactttgtatttgattgtgttgagatgaccgtagggaaaagttaactaattataagcgtaaattatgttcttggattcggcttttatattttcttttcgtttaataaaagtggtcatagagatattctacaatgtattttggtaagttacctaaaatttaatttgattatttttcacataattaatcaactgataaaattttatttggatcaaccgatcaagaagtgaaaacgtaaagaacaaaaagaaacagagggagtatattattatcttttacttttgatagtgaaggatgttatgatattttaactcaatcccttacaaaatatactggttaaatttcttaacaatgtagtactttggcaacaagttcaggttgaaagctttgagaaatagagttaggaaacataagaatcacaaaatttat

SEQ ID NO: 35 - DNA, 1752 bp, Spinacia oleracea
gtttgtgttataagttacaacaatttaaaaacggagaacatacttataatactagtgtaatctttggccggattatggtcgttgacaaaaaaactccggccttgaccctccacgtgccggtcaagtgacttaataaaccttttattccacccttttttcattcttctttttattcttctttttctctccattaatacaaatcaagtgattatgtcgatccgatccttctgttctctactgtaattgattacaccaacaacaaccaagcgaaacagtcaatgttaccgaattgaattgcggaaaatagtttatgattgattcattaaaaaaggatggagttttgtggatttgaataagacaacgaattgagattcctggggttttctttctgttggggttggatttcatgtacttgttgctgatcaaatatgtgattgaagattgaagatgatgatgtgtttatgggtttgaaatcggattaaatttatgggaaatgtaagtgaattggggatgcacataaggtgtttgatgaaatgtctatgagaaatattgtttcttgcacttgtatgataatttgtggggatttgattagttcatggtgcgagtttgatgcaacgccgaagagaaatcaggtctttagagaaactcaaatggttgaataggcttccaacaatgttgtttcgtagtacactgccatgattgatagagaaggaagcagatgaaggagaaggctcatgtgaccggcacatgggtagtaagtcaacgccggaaatcgtggtcaacgtccaaaaccgagctaaggtaacatattggagtacaagtaattacaacaaaaagtgttacttccttgtacattattattttacttgaaatgctagttgtgtttgtgcatctgtggaactctaaattaattaattaacaatcaaccaaacaactttagtgtaaattggccaaccttttgccatcagccacagaaaagtgaaatatcaccccattattgcccattctgtatttgcacttttttttaaggcatagcacagccggttttccggatcttagctccgtctacattcggatccgatccatttcgcacaccttatttgtggtggatgagtctcccaacaagaatttctcgctcgaaactgagaacccccttaagcggcatcaagttgcttaccacttgagccaactctatgttggtttctgcatttgcagttagttaggtcgtctgagtgcgaaatgggaatgctttatcacacactccacagtttagtcaggctgatggaaacgtaataattgagttatttgagtgttcaaacttaaagtcactcactcactcaaacactcaatactttctccatcttgttttctcattacatatgaaaacccaaacacctttcatttctgcttaatcttctttctctcatctttcagttattcacctgttcatctttctgaaaacaacccaaacacccttcatttctgtttaatcttctttcctcatcttcatccacctgtttatctttctgtaaacacaacccaaacacctttcatttctgatttatcttgttatctcatcttcattcacctgttcatctttctgaaaatctaaacacccttcatttctgctaatcttcttttctcatctccccctaaatcatctttctgaaaacccaaacacctttcttttctgcttttatcttgttttctcatcttaattcatctcttcatctttctgaaaaacccaaccca

SEQ ID NO: 36 - DNA, 3429 bp, Spinacia oleracea
atggctgaaatcggatactcggtttgttcaaaacttattgaagtgatgggcagtaatatcattaaagagattcgcgacatgtggggttacaattctcatcttgaagacctcaacaaatctgtcttgacgatcaaggatgtgctcttggatgctgaggcgaagcgggatctttcccgtgaacaacagagttacattgcagaacttaaggatgttgtttacgatgctgatgatttgttcgatgagttcctcactcttgctgagctcaaacagattgatggaaacaagggtggtggtaaattctccaaaaaggtacgtcgtttcttttcttctaataaggagaagatgggtcaagcttacaagatgtctcatatggttaaagaaattaagaagcagttgggtgaaattgttgataggtataccaaatttgggtttattgttgattataaacctattattaggagaagggaggaaacatgttcttattttgtaggtgccaaggagattgttgggagggataaggataaagatgttatcataggcatgttgctagatcatgataacgattgtagtttcttggctgttgtgggggttggaggggtgggaaaaactactcttgcccaacttgtgtataatgatgaaagagtcaaaagtgagttccaagatttgaggtattgggtttgtgtctctgatcaagatgggggacaatttgatgacaaaagaattctttgtaagattatagagttagttacgggccagattcctccgagtaacgagagcatggaatcggtgcgtaagaaatttcaagaggaattaggaggaaagaagtacttccttgttcttgatgatgtatggaacgaggatcgccagaagtggcttcatctagaaaatttcttgaaattgggtcaagggggaagcaagattgtggtaaccacacgttcagagaagacggcaaatgttatagggaaaagacaagactataaactagaatgtttgtcagcagaggattcatggcgcttatttgaaatgtcagcttttgacgaagggcatggccaggaaaactatgacgaattagtgacgattggcaagaagattgttgaaaaatgttataacaatccacttgctataacagtggtaggaagccttctttttggacaagagataaataagtggcggtcgtttgaaagcagtggattagcccaaattgccaatggtgataatcagattttcccgatattaaagctcagttaccacaatcttccacactccttgaagagctgctttagctattgtgcagtgtttcccaaagataatgaaataaagaaggagatgttgattgatctttggatagcacaaggatacattataccgttggatggaggtcaaagtatagaagatgctgccgaggaacattttgtaattttgttaagaagatgtttctttcaagatgtaaagaaggattctcttggtaatgttgattatgttaaaatccacgacttaatgcacgatgtcgctcaagaagtggggaaggaggaaatctgtgtagtgacttcaggtacaaagaagttggctgataaaatccgtcacgtgggttgtgttgtcgatagagatccagaaatagtctttttatgtagcaataagattcgttcgtatattagcggtcgttgtataaagaatccggtggattcacaaatagacaactggatgcgccttagggtgttggacttgtcagattcatgtgttaaagatttgtctgattcaataggtaagctgctgcacttaaggtatcttaacctctcttctaatataaagttggagataatccctgatgcaattacaagactgcataacttgcagacactacttttagaagattgcagaagtttaaaggagttgccaaaagatttttgcaaattggtcaaactgaggcacttggaattacagggttgtcatgatttgattggtatgccatttggaatggataagctaactagtcttagaatactaccaaacattgtggtgggtaggaaggaacaaagtgatgatgagctgaaagccctaaaaggcctcatcgagataaaaggctccatttctatcagaatctattcaaagtatagaatagttgaaggcatgaatgacacaggaggagctgcttatttgaagagcatgaaacatctcagggagattgatattacatttttgggtgaatgtgttagccctgaagctgtattggaaaccttagagccaccttcaaatatcaagagcttatatatatataattacagtggtacaacaattccagtatggggaagagcagagattaattgggcaatctccctctcacatctcgtcgacatccagcttagttgttgtagtaatttgcaggagatgccagtgctgagtaaactgcctcatttgaaatcgctgaaacttggatggttggataacttagagtacatggagagtagcagtagcagtgacacagaagcagcaacaccagaattaccaacattcttcccttcccttgaaaaacttactttacagcatctggaaaagttgaagggttttgggaacaggagatcgagtagttttccccgcctctctgaattggaaatcaagaaatgcccagatctaacgtcatttccttcttgtccaagccttgagaagttggaattgaaagaaagcaatgaagcgttgcaaataatagtaaaaataacaacaagaggtaaagaaaaagaagagaacaataatgctggtgttggaaattcacaagatgatgacaaagtcaaattacggaagatggtgatagacaatctgggttatctcaaatcactgcccacaaattgtcttactcaccttgaaattgaggagtttattgaatcagattccgaggaagagattgaatcagaagtcggggaggaggaggttgaattggaagttgtggaggcatttcagaagtctgcatcttctctgcaaagcctcgaaatatacagaataaataaactgaatagactaactggaacaacaggattagtgcatttcagtgccttggacgaactcacattgaattttgtcgacgattttgaagtatcctttcctcaaagcctccgcagtttgaaaattgaatactcttataaaatgacaagtctgcccatggggatgcagtacttaacctccctccaaaccctcgaactaaaatgttgtgatgaattgaattcccttccagaatggataagcaacttatcatctcttcaatccctgtccatatcctactgtgaagccctgaaatcactaccagaagcaatgcagaacctcacctcccttcagagacttgtgataagagaatgtcgagacctagctgaaagatgcgaagaacccaatggggaagactatcacaaaattcaacacatccccaaaattgaaatatggtag

SEQ ID NO: 37 - protein, 1142 aa, Spinacia oleracea
MAEIGYSVCSKLIEVMGSNIIKEIRDMWGYNSHLEDLNKSVLTIKDVLLDAEAKRDLSREQQSYIAELKDVVYDADDLFDEFLTLAELKQIDGNKGGGKFSKKVRRFFSSNKEKMGQAYKMSHMVKEIKKQLGEIVDRYTKFGFIVDYKPIIRRREETCSYFVGAKEIVGRDKDKDVIIGMLLDHDNDCSFLAVVGVGGVGKTTLAQLVYNDERVKSEFQDLRYWVCVSDQDGGQFDDKRILCKIIELVTGQIPPSNESMESVRKKFQEELGGKKYFLVLDDVWNEDRQKWLHLENFLKLGQGGSKIVVTTRSEKTANVIGKRQDYKLECLSAEDSWRLFEMSAFDEGHGQENYDELVTIGKKIVEKCYNNPLAITVVGSLLFGQEINKWRSFESSGLAQIANGDNQIFPILKLSYHNLPHSLKSCFSYCAVFPKDNEIKKEMLIDLWIAQGYIIPLDGGQSIEDAAEEHFVILLRRCFFQDVKKDSLGNVDYVKIHDLMHDVAQEVGKEEICVVTSGTKKLADKIRHVGCVVDRDPEIVFLCSNKIRSYISGRCIKNPVDSQIDNWMRLRVLDLSDSCVKDLSDSIGKLLHLRYLNLSSNIKLEIIPDAITRLHNLQTLLLEDCRSLKELPKDFCKLVKLRHLELQGCHDLIGMPFGMDKLTSLRILPNIVVGRKEQSDDELKALKGLIEIKGSISIRIYSKYRIVEGMNDTGGAAYLKSMKHLREIDITFLGECVSPEAVLETLEPPSNIKSLYIYNYSGTTIPVWGRAEINWAISLSHLVDIQLSCCSNLQEMPVLSKLPHLKSLKLGWLDNLEYMESSSSSDTEAATPELPTFFPSLEKLTLQHLEKLKGFGNRRSSSFPRLSELEIKKCPDLTSFPSCPSLEKLELKESNEALQIIVKITTRGKEKEENNNAGVGNSQDDDKVKLRKMVIDNLGYLKSLPTNCLTHLEIEEFIESDSEEEIESEVGEEEVELEVVEAFQKSASSLQSLEIYRINKLNRLTGTTGLVHFSALDELTLNFVDDFEVSFPQSLRSLKIEYSYKMTSLPMGMQYLTSLQTLELKCCDELNSLPEWISNLSSLQSLSISYCEALKSLPEAMQNLTSLQRLVIRECRDLAERCEEPNGEDYHKIQHIPKIEIW

SEQ ID NO: 38 - DNA, 7789 bp, Spinacia oleracea
atggccgaaatcggatactcggtttgtgcgaaactcatcgaagtgattggcagtgagctgatcaaagagatttgtgacacatggggttacaaatctcttcttgaggacctcaacaaaactgtattgacggtcaggaacgttctcattcaagccggggtgatgcgggagcttactagtgaacaacaaggtttcattgcagaccttaaagatgttgtttatgatgctgatgacttgttcgacaagttactcactcgtgctgagcgaaaacagattgatggaaacgaaatctctgaaaaggtacgtcgtttcttttcctctagtaacaagatcggtcaagcttactacatgtctcgtaaggttaaggaaattaagaagcagttggatgaaattgttgataggcatacaaaatttgggtttagtgctgagtttatacctgtttgtaggggaaggggaaacgagagggaaacacgttcatatatagatgtcaagaatattcttgggagggataaagataagaatgatatcatagataggttgcttaatcgtaatggtaatgaagcttgtagtttcctgaccatagtgggagcgggaggattgggaaaaactgctcttgcacaacttgtgttcaatgatgaaagggtcaaaattgagttccatgatttgaggtattgggtttgtgtctctgatcaagatgggggccaatttgatgtgaaagaaatcctttgtaagattttagaggtggttactaaggagaaagttgataatagttccacattggaattggtacaaagccaatttcaagagaagttaagaggaaagaagtacttccttgttcttgatgatgtatggaacgaagatcgtgagaagtggcttcctttggaagagttgttaatgttgggtcaagggggaagcaaggttgtagtgaccacacgttcagagaagacagcaaatgtcatagggaaaagacatttttatacactggaatgtttgtcaccagattattcatggagcttatttgaaatgtcggcttttcagaaagggcatgagcaggaaaaccatcacgaactagttgatattgggaaaaagattgttgaaaaatgttataacaatccacttgctataacggtggtaggaagtcttctttatggagaggagataagtaagtggcggtcatttgaaatgagtgagttggccaaaattggcaatggggataataagattttgccgatattaaagctcagttaccataatcttataccctcgttgaagagttgttttagttattgtgcagtgtttcccaaggatcatgaaataaagaaggagatgttgattgaactttggatggcacaaggatatgttgtgccgttggatggaggtcaaagtatagaagatgctgccgaggaacattttgtaattttgttacgaaggtgtttctttcaagatgtaaagaaggataaatatggtgatgttgattctgttaaaatccacgacttgatgcacgatgtcgcccaagaagtggggagggaggaattatgtgtagtgaatgataatacaaagaacttgggtgataaaatccgtcatgtacatcgtgatgtcattagatatgcacaaagagtctctctgtgtagccatagccataagattcgttcgtatattggtggtaattgtgaaaaacgttgtgtggatacactaatagacaagtggatgtgtcttaggatgttggacttgtcatggtcggatgttaaaaatttgcctaattcaataggtaaattgttgcacttgaggtgtcttaacctgtcttataataaagatctgttgatactccctgatgcaattacaagactgcataatttgcagacactgcttttaaaagagtgcagaagtttaaaggagttgccaaaagatttttgcaaattggtcaaactgaggcacttggatttaaggtgttctgatttgaaggagttgccaaaagatttttgcaaattggtcaaactgaggcacttggatttatggggttgtgatgatttgattggtgtgccattgggaatggataggctaattagtcttagagtactgccattctttgtggtgggtaggaaggaacaaagtgatgatgatgagctgaaagccctaaaaggcctcaccgagataaaaggctccattcgtattagaatctattcaaagtatagaatagttgaaggcatgaatgacacaggaggagctgggtatttaaagagcatgaaacatctcacgggggttgatattacatttgatggtggatgtgttaaccctgaagctgtgttggcaaccctagagccaccttcaaatatcaagaggttagagatgtggcattacagtggtacaacaattccagtatggggaagagcagagattaattgggcaatctccctctcacatcttgtcgacatccagctttggcattgtcgtaatttgcaggagatgccagtgctgagtaaactgcctcatttgaaatcactggaactttataatttgattagtttagagtacatggagagcacaagcagaagcagtagcagtgacacagaagcagcaacaccagaattaccaacattcttcccttcccttgaaaaacttacactttggcgtctggacaagttgaagggttttgggaacaggagatcgagtagttttccccgcctctctaaattggaaatctggaaatgcccagatctaacgtcatttccttcttgtccaagccttgaagagttggaattgaaagaaaacaatgaagcattgcaaataatagtaaaaataacaacaacaagaggtaaagaagaaaaagaagaagacaagaatgctggtgttggaaattcacaagatgatgacaatgtcaaattacggaaggtggaaatagacaatgtgagttatctcaaatcactgcccacaaattgtcttactcacctcgaccttacaataagagattccaaggagggggagggtgaatgggaagttggggatgcatttcagaagtgtgtatcttctttgagaagcctcaccataatcggaaatcacggaataaataaagtgaagagactgtctggaagaacagggttggagcatttcactctgttggaatcactcaaactttcagatatagaagaccaggaagatgagggcgaagacaacatcatattctggaaatcctttcctcaaaacctccgcagtttgagaattaaagactctgacaaaatgacaagtttgcccatggggatgcagtacttaacctccctccaaaccctctatctacaccattgttatgaattgaattcccttccagaatggataagcagcttatcatctcttcaatccctgcacataggaaaatgtccagccctaaaatcactaccagaagcaatgcggaacctcacctcccttcagagacttacgatatggcagtgtccagacctaattgaaagatgcaaagaacctaacggggaggactatcccaaaattcaacacatccccaaaattgtaagtcattgcagaaagtaatttattcatttatatttattttatgcttagaatgatatacaccgtcgtcctttggtttcaaatcttgaatttggtttttgttttctttctttgtttctttattcaacaccagcccatttatgattgattcattaaaaaaaggatggagttttgtggatttgaagaagacaacgaattgagattcctggggttttctttttgttggggttggatttcatgtatatgttgctgattaaatacgagactgatgatgatgatgatgtgtttatgggttttaaatcagattaaatatatgggaaatgtaagttaatttgggatgcacataaggtgtttgctgaaatgtctatgagaaatgttgtttcttggacttagaatgatatacactgtcgtccattggtttccaatcttacatttggtttgtgttttcttagtttgtttctttaatcaacaccaacccatttttttaaaactacctgcaactactaatttacgttgaccctgtatctcaggtactaaataaatattggtgattttcagttactcaacactagcttgatcctgaacgcacccaaccttcaggttagaatccggcttactcatccttttgtccagttttcaagtaattgttttggcaggatcaattctctaattgttgtacaccgtatattgcaatttatagtgactacagttaatgaatgtttacaaaaaattagtcatgtaaaaacttcttctctgtccattacataaactctttttctctttctaacttatcatgttcatgtctaaaaaattaaacatgctcacatcaatgttcatttaagctaacttacttctgtaagagagcgagctagttaaaaactcctttaactttctgttttatactcaggacatggattgatgcaagcatgaagaacttcgggaatttgctaaaactctaccaaagcgatgagagtttggactttgtttcacttgaagtcagggactgtcaacaaagccacagtgtgcatgttggctgtttcacttggacgataaaaaggtttatttaattgttttcctaagtgtatttggcttacaagcttttacttttcgcttgaaagggtttttcttgttttaagctttttgaattagagtttcggttgaagtaagagtagtcgtattagtcttttactttgcaggagtctatgcctatataaggtaagactcgtatttgtaattttcagattatgcaattcaagttttcgagtgttttcttaaaaaaacatatcatacctgtgtgtagcataaagataaattctgatgctgtgcttcttgttatggctcacattggttttcattgtttggattgtttcacagggaagcagagaatacctggaacctgtaaaggacgctatatctatagcagctttcacaggccaagtaatataatgttctttatcaatcactcaatacctggagattgtttgaacacataattcacctctttttttccatctcaaattgcagacttttactgggatttgaatgacagcaaacatttgattgtcacgaggattgatctaactggtgaatgttgtgatcaccatattggtctttctcattcaaacaaacttgcataccgttcttttgaagtttgaagacaagcaggcgataatcaactcaggtcgaagctcatgtgcaggagagaatagaatatagaggagattatttttaaaagaaacgctcaaaggtattgtagcacctttcctatttgctactgcagtgatgtttttatttcttgtttgcagcgcttgtttctcatatttcaacctacttttagaaaaaaaaacatctccgaacataaccaaaaataaagttcccttatcagtgctttccctgctttcttctaaacaacatatacaattataaaccctttttctctcttacctttgttattcttccttgcttcattgagataacactctcctgtttttgttttgttgttagtcattacatggatatatcaaggacaacagttctgtagtccgtcaactgtggttaggaaggctaaactggagcacaataaccccatgtcaattgaatagtaaaggtgtgctatatcagtttcgtttggcttggcttacctgaaaaatggctggttatttatccttgtctctttctatgacgtgcagtggcttgttaatgtgtctcggacaacaattcctcactttccaagttccatacacgctgatgtaactatcttctgcagtctgttctttcatttttgccacgtgctctaattataactttttgtactcaataatcaactccttgtcccggtatttgcagagactacttaaacaggtaaagtgacaatcctggcgaagttgtctgtttcttagctctgaacccatcattcaggtaagattaagtatttaagaagaaattttgtttttacctaaaatgaatgatcttgtgtaactgcttgcttcttgcattaaataagaactttctgctgcatatgtgacagttacatccacaaaaaagttggaggtttgttcagggattggaaatgaaggtacttcagaattcctggaatgtttatgaatgctccagacttcagagtctttaatggaaaattcgagtcactaaaaaaacattattcctatcatcagagctttgaagttcctctatacaaggtcaactgagttcctctttgcctcttgtttaattgtatttacttgtaccttaattataatctgtatattgttttagttaagttctaaaacaggttattattcatcatttgtgcagcatattgctggaatcaagaatctagtgcttcttcttcctgacttcactgtcaaaatagcagttcccatgctggaaataagcgcgctagcaatgtaattgatgacatggatgttgctgcttctgagttttgatcataaaaagctgttatgtgtttcttgaatgtaatgaaggagaggagaaaactgaaaactcttggcaaaaacgtgaaattgcagtgcctcggggtggtagggatcacccggattcagttcagacgatacttttttcaacccggtttgttccggttttcagcttcgggttttccttgtacttttggggcacacatacaaggctacttcatgtttgagaaacctaattgaggctatcttgtagcaaatgcacaccacactctttctctcttctctccttttttcaccttccatttgtaaaaatcctcttttaaaggttaataaaaaaaagcttcaagtctcgtagggtggatgtaggtcacattgaccgaaccacggtaaactctttgtgttctttcttctctctttgtttctcatttttacggcaagtgtttatggttaaccatgcatcttagaatagcttaaggcattaacataataacatcaatgttctccaaagattcaccttacttgttgtacataatcacaatgttaagcctatgaaggtagaatgctctcatgatttggtttaaccaaaaaataaactctaaaataatacggagtaataaaaattggccataaactaattacaaagtttgatttttgtatagggtatcttgtacttgtgataaaaaaaattttaaaaaaattaaaaagtaaataaattacttattccttctatttttacttgttacacttttctacaacagaaacatcaaaacgcccgcaacacactataaatgaaaaaccattttgtatgcaatgatatttacgttctcactttattctctttaataactcctactacgtaattctcaccaatcaaataaaattatagaaattttcatttataccctcttaaaatgatgttgatttttttttttttttttaaggtgtgaaaaagtttgtgttatacttacaacaatttaaaaacggagaacatacttataatactagtgtaatctttggccggattatggtcgttgacaaaaaaactccggccttgaccctccacgtgccggtcaagttcttcttttttcattcttctttttattcttctttttctctccattaatacaaatcaagtgattatgtcgatccgatccttctgttctctactgtaattgattacaccaacaacaaccaagcgaaacagtcaatgttaccgaattgaattgcggaaaatagtttatgattgattcattaaaaaaggatggagttttgtggatttgaataagacaacgaattgagattcctggggttttctttctgttggggttggatttcatgtacttgtt

SEQ ID NO: 39 - DNA, 2000 bp, Spinacia oleracea; identical to SEQ ID NO: 13

SEQ ID NO: 40 - DNA, 3534 bp, Spinacia oleracea
atggccgaaatcggatactcggtttgtgcgaaactcatcgaagtgattggcagtgagctgatcaaagagatttgtgacacatggggttacaaatctcttcttgaggacctcaacaaaactgtattgacggtcaggaacgttctcattcaagccggggtgatgcgggagcttactagtgaacaacaaggtttcattgcagaccttaaagatgttgtttatgatgctgatgacttgttcgacaagttactcactcgtgctgagcgaaaacagattgatggaaacgaaatctctgaaaaggtacgtcgtttcttttcctctagtaacaagatcggtcaagcttactacatgtctcgtaaggttaaggaaattaagaagcagttggatgaaattgttgataggcatacaaaatttgggtttagtgctgagtttatacctgtttgtaggggaaggggaaacgagagggaaacacgttcatatatagatgtcaagaatattcttgggagggataaagataagaatgatatcatagataggttgcttaatcgtaatggtaatgaagcttgtagtttcctgaccatagtgggagcgggaggattgggaaaaactgctcttgcacaacttgtgttcaatgatgaaagggtcaaaattgagttccatgatttgaggtattgggtttgtgtctctgatcaagatgggggccaatttgatgtgaaagaaatcctttgtaagattttagaggtggttactaaggagaaagttgataatagttccacattggaattggtacaaagccaatttcaagagaagttaagaggaaagaagtacttccttgttcttgatgatgtatggaacgaagatcgtgagaagtggcttcctttggaagagttgttaatgttgggtcaagggggaagcaaggttgtagtgaccacacgttcagagaagacagcaaatgtcatagggaaaagacatttttatacactggaatgtttgtcaccagattattcatggagcttatttgaaatgtcggcttttcagaaagggcatgagcaggaaaaccatcacgaactagttgatattgggaaaaagattgttgaaaaatgttataacaatccacttgctataacggtggtaggaagtcttctttatggagaggagataagtaagtggcggtcatttgaaatgagtgagttggccaaaattggcaatggggataataagattttgccgatattaaagctcagttaccataatcttataccctcgttgaagagttgttttagttattgtgcagtgtttcccaaggatcatgaaataaagaaggagatgttgattgaactttggatggcacaaggatatgttgtgccgttggatggaggtcaaagtatagaagatgctgccgaggaacattttgtaattttgttacgaaggtgtttctttcaagatgtaaagaaggataaatatggtgatgttgattctgttaaaatccacgacttgatgcacgatgtcgcccaagaagtggggagggaggaattatgtgtagtgaatgataatacaaagaacttgggtgataaaatccgtcatgtacatcgtgatgtcattagatatgcacaaagagtctctctgtgtagccatagccataagattcgttcgtatattggtggtaattgtgaaaaacgttgtgtggatacactaatagacaagtggatgtgtcttaggatgttggacttgtcatggtcggatgttaaaaatttgcctaattcaataggtaaattgttgcacttgaggtgtcttaacctgtcttataataaagatctgttgatactccctgatgcaattacaagactgcataatttgcagacactgcttttaaaagagtgcagaagtttaaaggagttgccaaaagatttttgcaaattggtcaaactgaggcacttggatttaaggtgttctgatttgaaggagttgccaaaagatttttgcaaattggtcaaactgaggcacttggatttatggggttgtgatgatttgattggtgtgccattgggaatggataggctaattagtcttagagtactgccattctttgtggtgggtaggaaggaacaaagtgatgatgatgagctgaaagccctaaaaggcctcaccgagataaaaggctccattcgtattagaatctattcaaagtatagaatagttgaaggcatgaatgacacaggaggagctgggtatttaaagagcatgaaacatctcacgggggttgatattacatttgatggtggatgtgttaaccctgaagctgtgttggcaaccctagagccaccttcaaatatcaagaggttagagatgtggcattacagtggtacaacaattccagtatggggaagagcagagattaattgggcaatctccctctcacatcttgtcgacatccagctttggcattgtcgtaatttgcaggagatgccagtgctgagtaaactgcctcatttgaaatcactggaactttataatttgattagtttagagtacatggagagcacaagcagaagcagtagcagtgacacagaagcagcaacaccagaattaccaacattcttcccttcccttgaaaaacttacactttggcgtctggacaagttgaagggttttgggaacaggagatcgagtagttttccccgcctctctaaattggaaatctggaaatgcccagatctaacgtcatttccttcttgtccaagccttgaagagttggaattgaaagaaaacaatgaagcattgcaaataatagtaaaaataacaacaacaagaggtaaagaagaaaaagaagaagacaagaatgctggtgttggaaattcacaagatgatgacaatgtcaaattacggaaggtggaaatagacaatgtgagttatctcaaatcactgcccacaaattgtcttactcacctcgaccttacaataagagattccaaggagggggagggtgaatgggaagttggggatgcatttcagaagtgtgtatcttctttgagaagcctcaccataatcggaaatcacggaataaataaagtgaagagactgtctggaagaacagggttggagcatttcactctgttggaatcactcaaactttcagatatagaagaccaggaagatgagggcgaagacaacatcatattctggaaatcctttcctcaaaacctccgcagtttgagaattaaagactctgacaaaatgacaagtttgcccatggggatgcagtacttaacctccctccaaaccctctatctacaccattgttatgaattgaattcccttccagaatggataagcagcttatcatctcttcaatccctgcacataggaaaatgtccagccctaaaatcactaccagaagcaatgcggaacctcacctcccttcagagacttacgatatggcagtgtccagacctaattgaaagatgcaaagaacctaacggggaggactatcccaaaattcaacacatccccaaaattgtactaaataaatattggtga

SEQ ID NO: 41 - DNA, 3567 bp, Spinacia oleracea
atggccgaaatcggatactcggtttgtgcgaaactcatcgaagtgattggcagtgagctgatcaaagagatttgtgacacatggggttacaaatctcttcttgaggacctcaacaaaactgtattgacggtcaggaacgttctcattcaagccggggtgatgcgggagcttactagtgaacaacaaggtttcattgcagaccttaaagatgttgtttatgatgctgatgacttgttcgacaagttactcactcgtgctgagcgaaaacagattgatggaaacgaaatctctgaaaaggtacgtcgtttcttttcctctagtaacaagatcggtcaagcttactacatgtctcgtaaggttaaggaaattaagaagcagttggatgaaattgttgataggcatacaaaatttgggtttagtgctgagtttatacctgtttgtaggggaaggggaaacgagagggaaacacgttcatatatagatgtcaagaatattcttgggagggataaagataagaatgatatcatagataggttgcttaatcgtaatggtaatgaagcttgtagtttcctgaccatagtgggagcgggaggattgggaaaaactgctcttgcacaacttgtgttcaatgatgaaagggtcaaaattgagttccatgatttgaggtattgggtttgtgtctctgatcaagatgggggccaatttgatgtgaaagaaatcctttgtaagattttagaggtggttactaaggagaaagttgataatagttccacattggaattggtacaaagccaatttcaagagaagttaagaggaaagaagtacttccttgttcttgatgatgtatggaacgaagatcgtgagaagtggcttcctttggaagagttgttaatgttgggtcaagggggaagcaaggttgtagtgaccacacgttcagagaagacagcaaatgtcatagggaaaagacatttttatacactggaatgtttgtcaccagattattcatggagcttatttgaaatgtcggcttttcagaaagggcatgagcaggaaaaccatcacgaactagttgatattgggaaaaagattgttgaaaaatgttataacaatccacttgctataacggtggtaggaagtcttctttatggagaggagataagtaagtggcggtcatttgaaatgagtgagttggccaaaattggcaatggggataataagattttgccgatattaaagctcagttaccataatcttataccctcgttgaagagttgttttagttattgtgcagtgtttcccaaggatcatgaaataaagaaggagatgttgattgaactttggatggcacaaggatatgttgtgccgttggatggaggtcaaagtatagaagatgctgccgaggaacattttgtaattttgttacgaaggtgtttctttcaagatgtaaagaaggataaatatggtgatgttgattctgttaaaatccacgacttgatgcacgatgtcgcccaagaagtggggagggaggaattatgtgtagtgaatgataatacaaagaacttgggtgataaaatccgtcatgtacatcgtgatgtcattagatatgcacaaagagtctctctgtgtagccatagccataagattcgttcgtatattggtggtaattgtgaaaaacgttgtgtggatacactaatagacaagtggatgtgtcttaggatgttggacttgtcatggtcggatgttaaaaatttgcctaattcaataggtaaattgttgcacttgaggtgtcttaacctgtcttataataaagatctgttgatactccctgatgcaattacaagactgcataatttgcagacactgcttttaaaagagtgcagaagtttaaaggagttgccaaaagatttttgcaaattggtcaaactgaggcacttggatttaaggtgttctgatttgaaggagttgccaaaagatttttgcaaattggtcaaactgaggcacttggatttatggggttgtgatgatttgattggtgtgccattgggaatggataggctaattagtcttagagtactgccattctttgtggtgggtaggaaggaacaaagtgatgatgatgagctgaaagccctaaaaggcctcaccgagataaaaggctccattcgtattagaatctattcaaagtatagaatagttgaaggcatgaatgacacaggaggagctgggtatttaaagagcatgaaacatctcacgggggttgatattacatttgatggtggatgtgttaaccctgaagctgtgttggcaaccctagagccaccttcaaatatcaagaggttagagatgtggcattacagtggtacaacaattccagtatggggaagagcagagattaattgggcaatctccctctcacatcttgtcgacatccagctttggcattgtcgtaatttgcaggagatgccagtgctgagtaaactgcctcatttgaaatcactggaactttataatttgattagtttagagtacatggagagcacaagcagaagcagtagcagtgacacagaagcagcaacaccagaattaccaacattcttcccttcccttgaaaaacttacactttggcgtctggacaagttgaagggttttgggaacaggagatcgagtagttttccccgcctctctaaattggaaatctggaaatgcccagatctaacgtcatttccttcttgtccaagccttgaagagttggaattgaaagaaaacaatgaagcattgcaaataatagtaaaaataacaacaacaagaggtaaagaagaaaaagaagaagacaagaatgctggtgttggaaattcacaagatgatgacaatgtcaaattacggaaggtggaaatagacaatgtgagttatctcaaatcactgcccacaaattgtcttactcacctcgaccttacaataagagattccaaggagggggagggtgaatgggaagttggggatgcatttcagaagtgtgtatcttctttgagaagcctcaccataatcggaaatcacggaataaataaagtgaagagactgtctggaagaacagggttggagcatttcactctgttggaatcactcaaactttcagatatagaagaccaggaagatgagggcgaagacaacatcatattctggaaatcctttcctcaaaacctccgcagtttgagaattaaagactctgacaaaatgacaagtttgcccatggggatgcagtacttaacctccctccaaaccctctatctacaccattgttatgaattgaattcccttccagaatggataagcagcttatcatctcttcaatccctgcacataggaaaatgtccagccctaaaatcactaccagaagcaatgcggaacctcacctcccttcagagacttacgatatggcagtgtccagacctaattgaaagatgcaaagaacctaacggggaggactatcccaaaattcaacacatccccaaaattttactcaacactagcttgatcctgaacgcacccaaccttcaggacatggattga

SEQ ID NO: 42 - protein, 1177 aa, Spinacia oleracea
MAEIGYSVCAKLIEVIGSELIKEICDTWGYKSLLEDLNKTVLTVRNVLIQAGVMRELTSEQQGFIADLKDVVYDADDLFDKLLTRAERKQIDGNEISEKVRRFFSSSNKIGQAYYMSRKVKEIKKQLDEIVDRHTKFGFSAEFIPVCRGRGNERETRSYIDVKNILGRDKDKNDIIDRLLNRNGNEACSFLTIVGAGGLGKTALAQLVFNDERVKIEFHDLRYWVCVSDQDGGQFDVKEILCKILEVVTKEKVDNSSTLELVQSQFQEKLRGKKYFLVLDDVWNEDREKWLPLEELLMLGQGGSKVVVTTRSEKTANVIGKRHFYTLECLSPDYSWSLFEMSAFQKGHEQENHHELVDIGKKIVEKCYNNPLAITVVGSLLYGEEISKWRSFEMSELAKIGNGDNKILPILKLSYHNLIPSLKSCFSYCAVFPKDHEIKKEMLIELWMAQGYVVPLDGGQSIEDAAEEHFVILLRRCFFQDVKKDKYGDVDSVKIHDLMHDVAQEVGREELCVVNDNTKNLGDKIRHVHRDVIRYAQRVSLCSHSHKIRSYIGGNCEKRCVDTLIDKWMCLRMLDLSWSDVKNLPNSIGKLLHLRCLNLSYNKDLLILPDAITRLHNLQTLLLKECRSLKELPKDFCKLVKLRHLDLRCSDLKELPKDFCKLVKLRHLDLWGCDDLIGVPLGMDRLISLRVLPFFVVGRKEQSDDDELKALKGLTEIKGSIRIRIYSKYRIVEGMNDTGGAGYLKSMKHLTGVDITFDGGCVNPEAVLATLEPPSNIKRLEMWHYSGTTIPVWGRAEINWAISLSHLVDIQLWHCRNLQEMPVLSKLPHLKSLELYNLISLEYMESTSRSSSSDTEAATPELPTFFPSLEKLTLWRLDKLKGFGNRRSSSFPRLSKLEIWKCPDLTSFPSCPSLEELELKENNEALQIIVKITTTRGKEEKEEDKNAGVGNSQDDDNVKLRKVEIDNVSYLKSLPTNCLTHLDLTIRDSKEGEGEWEVGDAFQKCVSSLRSLTIIGNHGINKVKRLSGRTGLEHFTLLESLKLSDIEDQEDEGEDNIIFWKSFPQNLRSLRIKDSDKMTSLPMGMQYLTSLQTLYLHHCYELNSLPEWISSLSSLQSLHIGKCPALKSLPEAMRNLTSLQRLTIWQCPDLIERCKEPNGEDYPKIQHIPKIVLNKYW

SEQ ID NO: 43 - protein, 1188 aa, Spinacia oleracea
MAEIGYSVCAKLIEVIGSELIKEICDTWGYKSLLEDLNKTVLTVRNVLIQAGVMRELTSEQQGFIADLKDVVYDADDLFDKLLTRAERKQIDGNEISEKVRRFFSSSNKIGQAYYMSRKVKEIKKQLDEIVDRHTKFGFSAEFIPVCRGRGNERETRSYIDVKNILGRDKDKNDIIDRLLNRNGNEACSFLTIVGAGGLGKTALAQLVFNDERVKIEFHDLRYWVCVSDQDGGQFDVKEILCKILEVVTKEKVDNSSTLELVQSQFQEKLRGKKYFLVLDDVWNEDREKWLPLEELLMLGQGGSKVVVTTRSEKTANVIGKRHFYTLECLSPDYSWSLFEMSAFQKGHEQENHHELVDIGKKIVEKCYNNPLAITVVGSLLYGEEISKWRSFEMSELAKIGNGDNKILPILKLSYHNLIPSLKSCFSYCAVFPKDHEIKKEMLIELWMAQGYVVPLDGGQSIEDAAEEHFVILLRRCFFQDVKKDKYGDVDSVKIHDLMHDVAQEVGREELCVVNDNTKNLGDKIRHVHRDVIRYAQRVSLCSHSHKIRSYIGGNCEKRCVDTLIDKWMCLRMLDLSWSDVKNLPNSIGKLLHLRCLNLSYNKDLLILPDAITRLHNLQTLLLKECRSLKELPKDFCKLVKLRHLDLRCSDLKELPKDFCKLVKLRHLDLWGCDDLIGVPLGMDRLISLRVLPFFVVGRKEQSDDDELKALKGLTEIKGSIRIRIYSKYRIVEGMNDTGGAGYLKSMKHLTGVDITFDGGCVNPEAVLATLEPPSNIKRLEMWHYSGTTIPVWGRAEINWAISLSHLVDIQLWHCRNLQEMPVLSKLPHLKSLELYNLISLEYMESTSRSSSSDTEAATPELPTFFPSLEKLTLWRLDKLKGFGNRRSSSFPRLSKLEIWKCPDLTSFPSCPSLEELELKENNEALQIIVKITTTRGKEEKEEDKNAGVGNSQDDDNVKLRKVEIDNVSYLKSLPTNCLTHLDLTIRDSKEGEGEWEVGDAFQKCVSSLRSLTIIGNHGINKVKRLSGRTGLEHFTLLESLKLSDIEDQEDEGEDNIIFWKSFPQNLRSLRIKDSDKMTSLPMGMQYLTSLQTLYLHHCYELNSLPEWISSLSSLQSLHIGKCPALKSLPEAMRNLTSLQRLTIWQCPDLIERCKEPNGEDYPKIQHIPKILLNTSLILNAPNLQDMD

SEQ ID NO: 44 - DNA, 7111 bp, Spinacia oleracea
atggccgaaatcggatactcggtttgtgcgaaactcatcgaagtgattggcagtgagctgatcaaagagatttgtgacacatggggttacaaatctcttcttgaggacctcaacaaaactgtattgacggtcaggaacgttctcattcaagccggggtgatgcgggagcttactagtgaacaacaaggtttcattgcagaccttaaagatgttgtttatgatgctgatgacttgttcgacaagttactcactcgtgctgagcgaaaacagattgatggaaacgaaatctctgaaaaggtacgtcgtttcttttcctctagtaacaagatcggtcaagcttactacatgtctcgtaaggttaaggaaattaagaagcagttggatgaaattgttgataggcatacaaaatttgggtttagtgctgagtttatacctgtttgtaggggaaggggaaacgagagggaaacacgttcatatatagatgtcaagaatattcttgggagggataaagataagaatgatatcatagataggttgcttaatcgtaatggtaatgaagcttgtagtttcctgaccatagtgggagcgggaggattgggaaaaactgctcttgcacaacttgtgttcaatgatgaaagggtcaaaattgagttccatgatttgaggtattgggtttgtgtctctgatcaagatgggggccaatttgatgtgaaagaaatcctttgtaagattttagaggtggttactaaggagaaagttgataatagttccacattggaattggtacaaagccaatttcaagagaagttaagaggaaagaagtacttccttgttcttgatgatgtatggaacgaagatcgtgagaagtggcttcctttggaagagttgttaatgttgggtcaagggggaagcaaggttgtagtgaccacacgttcagagaagacagcaaatgtcatagggaaaagacatttttatacactggaatgtttgtcaccagattattcatggagcttatttgaaatgtcggcttttcagaaagggcatgagcaggaaaaccatcacgaactagttgatattgggaaaaagattgttgaaaaatgttataacaatccacttgctataacggtggtaggaagtcttctttatggagaggagataagtaagtggcggtcatttgaaatgagtgagttggccaaaattggcaatggggataataagattttgccgatattaaagctcagttaccataatcttataccctcgttgaagagttgttttagttattgtgcagtgtttcccaaggatcatgaaataaagaaggagatgttgattgaactttggatggcacaaggatatgttgtgccgttggatggaggtcaaagtatagaagatgctgccgaggaacattttgtaattttgttacgaaggtgtttctttcaagatgtaaagaaggataaatatggtgatgttgattctgttaaaatccacgacttgatgcacgatgtcgcccaagaagtggggagggaggaattatgtgtagtgaatgataatacaaagaacttgggtgataaaatccgtcatgtacatcgtgatgtcattagatatgcacaaagagtctctctgtgtagccatagccataagattcgttcgtatattggtggtaattgtgaaaaacgttgtgtggatacactaatagacaagtggatgtgtcttaggatgttggacttgtcatggtcggatgttaaaaatttgcctaattcaataggtaaattgttgcacttgaggtgtcttaacctgtcttataataaagatctgttgatactccctgatgcaattacaagactgcataatttgcagacactgcttttaaaagagtgcagaagtttaaaggagttgccaaaagatttttgcaaattggtcaaactgaggcacttggatttaaggtgttctgatttgaaggagttgccaaaagatttttgcaaattggtcaaactgaggcacttggatttatggggttgtgatgatttgattggtgtgccattgggaatggataggctaattagtcttagagtactgccattctttgtggtgggtaggaaggaacaaagtgatgatgatgagctgaaagccctaaaaggcctcaccgagataaaaggctccattcgtattagaatctattcaaagtatagaatagttgaaggcatgaatgacacaggaggagctgggtatttaaagagcatgaaacatctcacgggggttgatattacatttgatggtggatgtgttaaccctgaagctgtgttggcaaccctagagccaccttcaaatatcaagaggttagagatgtggcattacagtggtacaacaattccagtatggggaagagcagagattaattgggcaatctccctctcacatcttgtcgacatccagctttggcattgtcgtaatttgcaggagatgccagtgctgagtaaactgcctcatttgaaatcactggaactttataatttgattagtttagagtacatggagagcacaagcagaagcagtagcagtgacacagaagcagcaacaccagaattaccaacattcttcccttcccttgaaaaacttagactttggcgtctggacaagttgaagggttttgggaacaggagatcgagtagttttccccgcctctctaaattggaaatctggaaatgcccagatctaacgtcatttccttcttgtccaagccttgaagagttggaattgaaagaaaacaatgaagcattgcaaataatagtaaaaataacaacaacaagaggtaaagaagaaaaagaagaagacaagaatgctggtgttggaaattcacaagatgatgacaatgtcaaattacggaaggtggaaatagacaatgtgagttatctcaaatcactgcccacaaattgtcttactcacctcgaccttacaataagagattccaaggagggggagggtgaatgggaagttggggatgcatttcagaagtgtgtatcttctttgagaagcctcaccataatcggaaatcacggaataaataaagtgaagagactgtctggaagaacagggttggagcatttcactctgttggaatcactcaaactttcagatatagaagaccaggaagatgagggcgaagacaacatcatattctggaaatcctttcctcaaaacctccgcagtttgagaattaaagactctgacaaaatgacaagtttgcccatggggatgcagtacttaacctccctccaaaccctctatctacaccattgttatgaattgaattcccttccagaatggataagcagcttatcatctcttcaatccctgcacataggaaaatgtccagccctaaaatcactaccagaagcaatgcggaacctcacctcccttcagagacttacgatatggcagtgtccagacctaattgaaagatgcaaagaacctaacggggaggactatcccaaaattcaacacatccccaaaattgtaagtcattgcagaaagtaatttattcatttatatttattttatgcttagaatgatatacaccgtcgtcctttggtttcaaatcttgaatttggtttttgttttctttctttgtttctttattcaacaccagcccatttatgattgattcattaaaaaaaggatggagttttgtggatttgaagaagacaacgaattgagattcctggggttttctttttgttggggttggatttcatgtatatgttgctgattaaatacgagactgatgatgatgatgatgtgtttatgggttttaaatcagattaaatatatgggaaatgtaagttaatttgggatgcacataaggtgtttgctgaaatgtctatgagaaatgttgtttcttggacttagaatgatatacactgtcgtccattggtttccaatcttacatttggtttgtgttttcttagtttgtttctttaatcaacaccaacccatttttttaaaactacctgcaactactaatttacgttgaccctgtatctcaggtactaaatgaatattggtgattttcagttactcaacactagcttgatcctgaacgcacccaaccttcaggttagaatccggcttactcatccttttgtccagttttcaagtaattgttttggcaggatcaattctctaattgttgtacaccgtatattgcaatttatagtgactacagttaatgaatgtttacaaaaaattagtcatgtaaaaacttcttctctgtccattacataaactctttttctctttctaacttatcatgttcatgtctaaaaaattaaacatgctcacatcaatgttcatttaagctaacttacttctgtaagagagcgagctagttaaaaactcctttaactttctgttttatactcaggacatggattgatgcaagcatgaagaacttcgggaatttgctaaaactctaccaaagcgatgagagtttggactttgtttcacttgaagtcagggactgtcaacaaagccacagtgtgcatgttggctgtttcacttggacgataaaaaggtttatttaattgttttcctaagtgtatttggcttacaagcttttacttttcgcttgaaagggtttttcttgttttaagctttttgaattagagtttcggttgaagtaagagtagtcgtattagtcttttactttgcaggagtctatgcctatataaggtaagactcgtatttgtaattttcagattatgcaattcaagttttcgagtgttttcttaaaaaaacatatcatacctgtgtgtagcataaagataaattctgatgctgtgcttcttgttatggctcacattggttttcattgtttggattgtttcacagggaagcagagaatacctggaacctgtaaaggacgctatatctatagcagctttcacaggccaagtaatataatgttctttatcaatcactcaatacctggagattgtttgaacacataattcacctctttttttccatctcaaattgcagacttttactgggatttgaatgacagcaaacatttgattgtcacgaggattgatctaactggtgaatgttgtgatcaccatattggtctttctcattcaaacaaacttgcataccgttcttttgaagtttgaagacaagcaggcgataatcaactcaggtcgaagctcatgtgcaggagagaatagaatatagaggagattatttttaaaagaaacgctcaaaggtattgtagcacctttcctatttgctactgcagtgatgtttttatttcttgtttgcagcgcttgtttctcatatttcaacctacttttagaaaaaaaaacatctccgaacataaccaaaaataaagttcccttatcagtgctttccctgctttcttctaaacaacatatacaattataaaccctttttctctcttacctttgttattcttccttgcttcattgagataacactctcctgtttttgttttgttgttagtcattacatggatatatcaaggacaacagttctgtagtccgtcaactgtggttaggaaggctaaactggagcacaataaccccatgtcaattgaatagtaaaggtgtgctatatcagtttcgtttggcttggcttacctgaaaaatggctggttatttatccttgtctctttctatgacgtgcagtggcttgttaatgtgtctcggacaacaattcctcactttccaagttccatacacgctgatgtaactatcttctgcagtctgttctttcatttttgccacgtgctctaattataactttttgtactcaataatcaactccttgtcccggtatttgcagagactacttaaacaggtaaagtgacaatcctggcgaagttgtctgtttcttagctctgaacccatcattcaggtaagattaagtatttaagaagaaattttgtttttacctaaaatgaatgatcttgtgtaactgcttgcttcttgcattaaataagaactttctgctgcatatgtgacagttacatccacaaaaaagttggaggtttgttcagggattggaaatgaaggtacttcagaattcctggaatgtttatgaatgctccagacttcagagtctttaatggaaaattcgagtcactaaaaaaacattattcctatcatcagagctttgaagttcctctatacaaggtcaactgagttcctctttgcctcttgtttaattgtatttacttgtaccttaattataatctgtatattgttttagttaagttctaaaacaggttattattcatcatttgtgcagcatattgctggaatcaagaatctagtgcttcttcttcctgacttcactgtcaaaatagcagttcccatgctggaaataagcgcgctagcaatgtaattgatgacatggatgttgctgcttctgagttttgatcataaaaagctgttatgtgtttcttgaatgtaatgaaggagaggagaaaactgaaaactcttggcaaaaacgtgaaattgcagtgcctcggggtggtagggatcacccggattcagttcagacgatacttttttcaacccggtttgttccggttttcagcttcgggttttccttgtacttttggggcacacatacaaggctacttcatgtttgagaaacctaattgaggctatcttgtagcaaatgcacaccacactctttctctcttctctccttttttcaccttccatttgtaaaaatcctcttttaaaggttaataaaaaaaagcttcaagtctcgtagggtggatgtaggtcacattgaccgaaccacggtaaactctttgtgttctttcttctctctttgtttctcatttttacggcaagtgtttatggttaaccatgcatcttagaatagcttaaggcattaacataataacatcaatgttctccaaagattcaccttacttgttgtacataatcacaatgttaagcctatgaaggtagaatgctctcatgatttggtttaaccaaaaaataaactctaaaataatacggagtaataaaaattggccataaattatttacaaagtttgatttttgtatagggtatcttg

SEQ ID NO: 45 - DNA, 2000 bp, Spinacia oleracea; identical to SEQ ID NO: 13

SEQ ID NO: 46 - DNA, 3534 bp, Spinacia oleracea
atggccgaaatcggatactcggtttgtgcgaaactcatcgaagtgattggcagtgagctgatcaaagagatttgtgacacatggggttacaaatctcttcttgaggacctcaacaaaactgtattgacggtcaggaacgttctcattcaagccggggtgatgcgggagcttactagtgaacaacaaggtttcattgcagaccttaaagatgttgtttatgatgctgatgacttgttcgacaagttactcactcgtgctgagcgaaaacagattgatggaaacgaaatctctgaaaaggtacgtcgtttcttttcctctagtaacaagatcggtcaagcttactacatgtctcgtaaggttaaggaaattaagaagcagttggatgaaattgttgataggcatacaaaatttgggtttagtgctgagtttatacctgtttgtaggggaaggggaaacgagagggaaacacgttcatatatagatgtcaagaatattcttgggagggataaagataagaatgatatcatagataggttgcttaatcgtaatggtaatgaagcttgtagtttcctgaccatagtgggagcgggaggattgggaaaaactgctcttgcacaacttgtgttcaatgatgaaagggtcaaaattgagttccatgatttgaggtattgggtttgtgtctctgatcaagatgggggccaatttgatgtgaaagaaatcctttgtaagattttagaggtggttactaaggagaaagttgataatagttccacattggaattggtacaaagccaatttcaagagaagttaagaggaaagaagtacttccttgttcttgatgatgtatggaacgaagatcgtgagaagtggcttcctttggaagagttgttaatgttgggtcaagggggaagcaaggttgtagtgaccacacgttcagagaagacagcaaatgtcatagggaaaagacatttttatacactggaatgtttgtcaccagattattcatggagcttatttgaaatgtcggcttttcagaaagggcatgagcaggaaaaccatcacgaactagttgatattgggaaaaagattgttgaaaaatgttataacaatccacttgctataacggtggtaggaagtcttctttatggagaggagataagtaagtggcggtcatttgaaatgagtgagttggccaaaattggcaatggggataataagattttgccgatattaaagctcagttaccataatcttataccctcgttgaagagttgttttagttattgtgcagtgtttcccaaggatcatgaaataaagaaggagatgttgattgaactttggatggcacaaggatatgttgtgccgttggatggaggtcaaagtatagaagatgctgccgaggaacattttgtaattttgttacgaaggtgtttctttcaagatgtaaagaaggataaatatggtgatgttgattctgttaaaatccacgacttgatgcacgatgtcgcccaagaagtggggagggaggaattatgtgtagtgaatgataatacaaagaacttgggtgataaaatccgtcatgtacatcgtgatgtcattagatatgcacaaagagtctctctgtgtagccatagccataagattcgttcgtatattggtggtaattgtgaaaaacgttgtgtggatacactaatagacaagtggatgtgtcttaggatgttggacttgtcatggtcggatgttaaaaatttgcctaattcaataggtaaattgttgcacttgaggtgtcttaacctgtcttataataaagatctgttgatactccctgatgcaattacaagactgcataatttgcagacactgcttttaaaagagtgcagaagtttaaaggagttgccaaaagatttttgcaaattggtcaaactgaggcacttggatttaaggtgttctgatttgaaggagttgccaaaagatttttgcaaattggtcaaactgaggcacttggatttatggggttgtgatgatttgattggtgtgccattgggaatggataggctaattagtcttagagtactgccattctttgtggtgggtaggaaggaacaaagtgatgatgatgagctgaaagccctaaaaggcctcaccgagataaaaggctccattcgtattagaatctattcaaagtatagaatagttgaaggcatgaatgacacaggaggagctgggtatttaaagagcatgaaacatctcacgggggttgatattacatttgatggtggatgtgttaaccctgaagctgtgttggcaaccctagagccaccttcaaatatcaagaggttagagatgtggcattacagtggtacaacaattccagtatggggaagagcagagattaattgggcaatctccctctcacatcttgtcgacatccagctttggcattgtcgtaatttgcaggagatgccagtgctgagtaaactgcctcatttgaaatcactggaactttataatttgattagtttagagtacatggagagcacaagcagaagcagtagcagtgacacagaagcagcaacaccagaattaccaacattcttcccttcccttgaaaaacttagactttggcgtctggacaagttgaagggttttgggaacaggagatcgagtagttttccccgcctctctaaattggaaatctggaaatgcccagatctaacgtcatttccttcttgtccaagccttgaagagttggaattgaaagaaaacaatgaagcattgcaaataatagtaaaaataacaacaacaagaggtaaagaagaaaaagaagaagacaagaatgctggtgttggaaattcacaagatgatgacaatgtcaaattacggaaggtggaaatagacaatgtgagttatctcaaatcactgcccacaaattgtcttactcacctcgaccttacaataagagattccaaggagggggagggtgaatgggaagttggggatgcatttcagaagtgtgtatcttctttgagaagcctcaccataatcggaaatcacggaataaataaagtgaagagactgtctggaagaacagggttggagcatttcactctgttggaatcactcaaactttcagatatagaagaccaggaagatgagggcgaagacaacatcatattctggaaatcctttcctcaaaacctccgcagtttgagaattaaagactctgacaaaatgacaagtttgcccatggggatgcagtacttaacctccctccaaaccctctatctacaccattgttatgaattgaattcccttccagaatggataagcagcttatcatctcttcaatccctgcacataggaaaatgtccagccctaaaatcactaccagaagcaatgcggaacctcacctcccttcagagacttacgatatggcagtgtccagacctaattgaaagatgcaaagaacctaacggggaggactatcccaaaattcaacacatccccaaaattgtactaaatgaatattggtga

SEQ ID NO: 47 - DNA, 3567 bp, Spinacia oleracea
atggccgaaatcggatactcggtttgtgcgaaactcatcgaagtgattggcagtgagctgatcaaagagatttgtgacacatggggttacaaatctcttcttgaggacctcaacaaaactgtattgacggtcaggaacgttctcattcaagccggggtgatgcgggagcttactagtgaacaacaaggtttcattgcagaccttaaagatgttgtttatgatgctgatgacttgttcgacaagttactcactcgtgctgagcgaaaacagattgatggaaacgaaatctctgaaaaggtacgtcgtttcttttcctctagtaacaagatcggtcaagcttactacatgtctcgtaaggttaaggaaattaagaagcagttggatgaaattgttgataggcatacaaaatttgggtttagtgctgagtttatacctgtttgtaggggaaggggaaacgagagggaaacacgttcatatatagatgtcaagaatattcttgggagggataaagataagaatgatatcatagataggttgcttaatcgtaatggtaatgaagcttgtagtttcctgaccatagtgggagcgggaggattgggaaaaactgctcttgcacaacttgtgttcaatgatgaaagggtcaaaattgagttccatgatttgaggtattgggtttgtgtctctgatcaagatgggggccaatttgatgtgaaagaaatcctttgtaagattttagaggtggttactaaggagaaagttgataatagttccacattggaattggtacaaagccaatttcaagagaagttaagaggaaagaagtacttccttgttcttgatgatgtatggaacgaagatcgtgagaagtggcttcctttggaagagttgttaatgttgggtcaagggggaagcaaggttgtagtgaccacacgttcagagaagacagcaaatgtcatagggaaaagacatttttatacactggaatgtttgtcaccagattattcatggagcttatttgaaatgtcggcttttcagaaagggcatgagcaggaaaaccatcacgaactagttgatattgggaaaaagattgttgaaaaatgttataacaatccacttgctataacggtggtaggaagtcttctttatggagaggagataagtaagtggcggtcatttgaaatgagtgagttggccaaaattggcaatggggataataagattttgccgatattaaagctcagttaccataatcttataccctcgttgaagagttgttttagttattgtgcagtgtttcccaaggatcatgaaataaagaaggagatgttgattgaactttggatggcacaaggatatgttgtgccgttggatggaggtcaaagtatagaagatgctgccgaggaacattttgtaattttgttacgaaggtgtttctttcaagatgtaaagaaggataaatatggtgatgttgattctgttaaaatccacgacttgatgcacgatgtcgcccaagaagtggggagggaggaattatgtgtagtgaatgataatacaaagaacttgggtgataaaatccgtcatgtacatcgtgatgtcattagatatgcacaaagagtctctctgtgtagccatagccataagattcgttcgtatattggtggtaattgtgaaaaacgttgtgtggatacactaatagacaagtggatgtgtcttaggatgttggacttgtcatggtcggatgttaaaaatttgcctaattcaataggtaaattgttgcacttgaggtgtcttaacctgtcttataataaagatctgttgatactccctgatgcaattacaagactgcataatttgcagacactgcttttaaaagagtgcagaagtttaaaggagttgccaaaagatttttgcaaattggtcaaactgaggcacttggatttaaggtgttctgatttgaaggagttgccaaaagatttttgcaaattggtcaaactgaggcacttggatttatggggttgtgatgatttgattggtgtgccattgggaatggataggctaattagtcttagagtactgccattctttgtggtgggtaggaaggaacaaagtgatgatgatgagctgaaagccctaaaaggcctcaccgagataaaaggctccattcgtattagaatctattcaaagtatagaatagttgaaggcatgaatgacacaggaggagctgggtatttaaagagcatgaaacatctcacgggggttgatattacatttgatggtggatgtgttaaccctgaagctgtgttggcaaccctagagccaccttcaaatatcaagaggttagagatgtggcattacagtggtacaacaattccagtatggggaagagcagagattaattgggcaatctccctctcacatcttgtcgacatccagctttggcattgtcgtaatttgcaggagatgccagtgctgagtaaactgcctcatttgaaatcactggaactttataatttgattagtttagagtacatggagagcacaagcagaagcagtagcagtgacacagaagcagcaacaccagaattaccaacattcttcccttcccttgaaaaacttagactttggcgtctggacaagttgaagggttttgggaacaggagatcgagtagttttccccgcctctctaaattggaaatctggaaatgcccagatctaacgtcatttccttcttgtccaagccttgaagagttggaattgaaagaaaacaatgaagcattgcaaataatagtaaaaataacaacaacaagaggtaaagaagaaaaagaagaagacaagaatgctggtgttggaaattcacaagatgatgacaatgtcaaattacggaaggtggaaatagacaatgtgagttatctcaaatcactgcccacaaattgtcttactcacctcgaccttacaataagagattccaaggagggggagggtgaatgggaagttggggatgcatttcagaagtgtgtatcttctttgagaagcctcaccataatcggaaatcacggaataaataaagtgaagagactgtctggaagaacagggttggagcatttcactctgttggaatcactcaaactttcagatatagaagaccaggaagatgagggcgaagacaacatcatattctggaaatcctttcctcaaaacctccgcagtttgagaattaaagactctgacaaaatgacaagtttgcccatggggatgcagtacttaacctccctccaaaccctctatctacaccattgttatgaattgaattcccttccagaatggataagcagcttatcatctcttcaatccctgcacataggaaaatgtccagccctaaaatcactaccagaagcaatgcggaacctcacctcccttcagagacttacgatatggcagtgtccagacctaattgaaagatgcaaagaacctaacggggaggactatcccaaaattcaacacatccccaaaattttactcaacactagcttgatcctgaacgcacccaaccttcaggacatggattga

SEQ ID NO: 48 - protein, 1177 aa, Spinacia oleracea
MAEIGYSVCAKLIEVIGSELIKEICDTWGYKSLLEDLNKTVLTVRNVLIQAGVMRELTSEQQGFIADLKDVVYDADDLFDKLLTRAERKQIDGNEISEKVRRFFSSSNKIGQAYYMSRKVKEIKKQLDEIVDRHTKFGFSAEFIPVCRGRGNERETRSYIDVKNILGRDKDKNDIIDRLLNRNGNEACSFLTIVGAGGLGKTALAQLVFNDERVKIEFHDLRYWVCVSDQDGGQFDVKEILCKILEVVTKEKVDNSSTLELVQSQFQEKLRGKKYFLVLDDVWNEDREKWLPLEELLMLGQGGSKVVVTTRSEKTANVIGKRHFYTLECLSPDYSWSLFEMSAFQKGHEQENHHELVDIGKKIVEKCYNNPLAITVVGSLLYGEEISKWRSFEMSELAKIGNGDNKILPILKLSYHNLIPSLKSCFSYCAVFPKDHEIKKEMLIELWMAQGYVVPLDGGQSIEDAAEEHFVILLRRCFFQDVKKDKYGDVDSVKIHDLMHDVAQEVGREELCVVNDNTKNLGDKIRHVHRDVIRYAQRVSLCSHSHKIRSYIGGNCEKRCVDTLIDKWMCLRMLDLSWSDVKNLPNSIGKLLHLRCLNLSYNKDLLILPDAITRLHNLQTLLLKECRSLKELPKDFCKLVKLRHLDLRCSDLKELPKDFCKLVKLRHLDLWGCDDLIGVPLGMDRLISLRVLPFFVVGRKEQSDDDELKALKGLTEIKGSIRIRIYSKYRIVEGMNDTGGAGYLKSMKHLTGVDITFDGGCVNPEAVLATLEPPSNIKRLEMWHYSGTTIPVWGRAEINWAISLSHLVDIQLWHCRNLQEMPVLSKLPHLKSLELYNLISLEYMESTSRSSSSDTEAATPELPTFFPSLEKLRLWRLDKLKGFGNRRSSSFPRLSKLEIWKCPDLTSFPSCPSLEELELKENNEALQIIVKITTTRGKEEKEEDKNAGVGNSQDDDNVKLRKVEIDNVSYLKSLPTNCLTHLDLTIRDSKEGEGEWEVGDAFQKCVSSLRSLTIIGNHGINKVKRLSGRTGLEHFTLLESLKLSDIEDQEDEGEDNIIFWKSFPQNLRSLRIKDSDKMTSLPMGMQYLTSLQTLYLHHCYELNSLPEWISSLSSLQSLHIGKCPALKSLPEAMRNLTSLQRLTIWQCPDLIERCKEPNGEDYPKIQHIPKIVLNEYW

SEQ ID NO: 49 - protein, 1188 aa, Spinacia oleracea
MAEIGYSVCAKLIEVIGSELIKEICDTWGYKSLLEDLNKTVLTVRNVLIQAGVMRELTSEQQGFIADLKDVVYDADDLFDKLLTRAERKQIDGNEISEKVRRFFSSSNKIGQAYYMSRKVKEIKKQLDEIVDRHTKFGFSAEFIPVCRGRGNERETRSYIDVKNILGRDKDKNDIIDRLLNRNGNEACSFLTIVGAGGLGKTALAQLVFNDERVKIEFHDLRYWVCVSDQDGGQFDVKEILCKILEVVTKEKVDNSSTLELVQSQFQEKLRGKKYFLVLDDVWNEDREKWLPLEELLMLGQGGSKVVVTTRSEKTANVIGKRHFYTLECLSPDYSWSLFEMSAFQKGHEQENHHELVDIGKKIVEKCYNNPLAITVVGSLLYGEEISKWRSFEMSELAKIGNGDNKILPILKLSYHNLIPSLKSCFSYCAVFPKDHEIKKEMLIELWMAQGYVVPLDGGQSIEDAAEEHFVILLRRCFFQDVKKDKYGDVDSVKIHDLMHDVAQEVGREELCVVNDNTKNLGDKIRHVHRDVIRYAQRVSLCSHSHKIRSYIGGNCEKRCVDTLIDKWMCLRMLDLSWSDVKNLPNSIGKLLHLRCLNLSYNKDLLILPDAITRLHNLQTLLLKECRSLKELPKDFCKLVKLRHLDLRCSDLKELPKDFCKLVKLRHLDLWGCDDLIGVPLGMDRLISLRVLPFFVVGRKEQSDDDELKALKGLTEIKGSIRIRIYSKYRIVEGMNDTGGAGYLKSMKHLTGVDITFDGGCVNPEAVLATLEPPSNIKRLEMWHYSGTTIPVWGRAEINWAISLSHLVDIQLWHCRNLQEMPVLSKLPHLKSLELYNLISLEYMESTSRSSSSDTEAATPELPTFFPSLEKLRLWRLDKLKGFGNRRSSSFPRLSKLEIWKCPDLTSFPSCPSLEELELKENNEALQIIVKITTTRGKEEKEEDKNAGVGNSQDDDNVKLRKVEIDNVSYLKSLPTNCLTHLDLTIRDSKEGEGEWEVGDAFQKCVSSLRSLTIIGNHGINKVKRLSGRTGLEHFTLLESLKLSDIEDQEDEGEDNIIFWKSFPQNLRSLRIKDSDKMTSLPMGMQYLTSLQTLYLHHCYELNSLPEWISSLSSLQSLHIGKCPALKSLPEAMRNLTSLQRLTIWQCPDLIERCKEPNGEDYPKIQHIPKILLNTSLILNAPNLQDMD

SEQ ID NO: 50 - DNA, 6025 bp, Spinacia oleracea
atggctgaaatcggatactcggtttgttcaaaacttattgaagtgatgggcagtaatatcattaaagagattcgcgacatgtggggttacaattctcatcttgaagacctcaacaaatctgtcttgacgatcaaggatgtgctcttggatgctgaggcgaagcgggatctttcccgtgaacaacagagttacattgcagaacttaaggatgttgtttacgatgctgatgatttgttcgatgagttcctcactcttgctgagctcaaacagattgatggaaacaagggtggtggtaaattctccaaaaaggtacgtcgtttcttttcttctaataaggagaagatgggtcaagcttacaagatgtctcatatggttaaagaaattaagaagcagttgggtgaaattgttgataggtataccaaatttgggtttattgttgattataaacctattattaggagaagggaggaaacatgttcttattttgtaggtgccaaggagattgttgggagggataaggataaagatgttatcataggcatgttgctagatcatgataacgattgtagtttcttggctgttgtgggggttggaggggtgggaaaaactactcttgcccaacttgtgtataatgatgaaagagtcaaaagtgagttccaagatttgaggtattgggtttgtgtctctgatcaagatgggggacaatttgatgacaaaagaattctttgtaagattatagagttagttacgggccagattcctccgagtaacgagagcatggaatcggtgcgtaagaaatttcaagaggaattaggaggaaagaagtacttccttgttcttgatgatgtatggaacgaggatcgccagaagtggcttcatctagaaaatttcttgaaattgggtcaagggggaagcaaggttgtggtaaccacacgttcagagaagacggcaaatgttatagggaaaagacaagactataaactagaatgtttgtcagcagaggattcatggcgcttatttgaaatgtcagcttttgacgaagggcatggccaggaaaactatgacgaattagtgacgattggcaagaagattgttgaaaaatgttataacaatccacttgctataacagtggtaggaagccttctttttggacaagagataaataagtggcggtcgtttgaaaacagtggattagcccaaattgccaatggtgataatcagattttcccgatattaaagctcagttaccacaatcttccacactccttgaagagctgctttagctattgtgcagtgtttcccaaagataatgaaataaagaaggagatgttgattgatctttggatagcacaaggatacattataccgttggatggaggtcaaagtatagaagatgctgccgaggaacattttgtaattttgttaagaagatgtttctttcaagatgtaaagaaggattctcttggtaatgttgattatgttaaaatccacgacttaatgcacgatgtcgctcaagaagtggggaaggaggaaatttgtgtagtgacttcaggtacaaagaagttggctgataaaatccgtcacgtgggttgtgttgtcgatagagatccagaaatagtctttttatgtagcaataagattcgttcgtatattagcggtcgttgtataaagaatccggtggattcacaaatagacaactggatgcgccttagggtgttggacttgtcagattcatgtgttaaagatttgtctgattcaataggtaagctgctgcacttaaggtatcttaacctctcttctaatataaagttggagataatccctgatgcaattacaagactgcataacttgcagacactacttttagaagattgcagaagtttaaaggagttgccaaaagatttttgcaaattggtcaaactgaggcacttggaattacagggttgtcatgatttgattggtatgccatttggaatggataagctaactagtcttagaatactaccaaacattgtggtgggtaggaaggaacaaagtgatgatgagctgaaagccctaaaaggcctcatcgagataaaaggctccatttctatcagaatctattcaaagtatagaatagttgaaggcatgaatgacacaggaggagctgcttatttgaagagcatgaaacatctcagggagattgatattacatttttgggtgaatgtgttagccctgaagctgtattggaaaccttagagccaccttcaaatatcaagagcttatatatatataattacagtggtacaacaattccagtatggggaagagcagagattaattgggcaatctccctctcacatctcgtcgacatccagcttagttgttgtagtaatttgcaggagatgccagtgctgagtaaactgcctcatttgaaatcgctgaaacttggatggttggataacttagagtacatggagagtagcagtagcagtgacacagaagcagcaacaccagaattaccaacattcttcccttcccttgaaaaacttactttacagcatctggaaaagttgaagggttttgggaacaggagatcgagtagttttccccgcctctctgaattggaaatcaagaaatgcccagatctaacgtcatttccttcttgtccaagccttgagaagttggaattgaaagaaagcaatgaagcgttgcaaataatagtaaaaataacaacaagaggtaaagaaaaagaagagaacaataatgctggtgttggaaattcacaagatgatgacaaagtcaaattacggaagatggtgatagacaatctgggttatctcaaatcactgcccacaaattgtcttactcaccttgaaattgaggagtttattgaatcagattccgaggaagagattgaatcagaagtcggggaggaggaggttgaattggaagttgtggaggcatttcagaagtctgcatcttctctgcaaagcctcgaaatatacagaataaataaactgaatagactaactggaacaacaggattagtgcatttcagtgccttggacgaactcacattgaattttgtcgacgattttgaagtatcctttcctcaaagcctccgcagtttgaaaattgaatactcttataaaatgacaagtctgcccatggggatgcagtacttaacctccctccaaaccctcgaactaaaatgttgtgatgaattgaattcccttccagaatggataagcaacttatcatctcttcaatccctgtccatatcctactgtgaagccctgaaatcactaccagaagcaatgcagaacctcacctcccttcagagacttgtgataagagaatgtcgagacctagctgaaagatgcgaagaacccaatggggaagactatcacaaaattcaacacatccccaaaattgtaagtgattgcggaaagtgtttcttttatttatttttaattttatgcttagaatgatatacatcagcattcagcgtccattggtttccaatcttacatttggtttttgtttcttagtttgtttctttaatcaacaccagcccattttttttaaactacctgcaactactaattttcatttaccctgtatctcaggaaatatggtagtattctcatttactcaacactagcttgatcctgaacgcagccaaccttcaggttagaatccgccttactcatccttttgtcatgcattgttttaagttgttttgcttgcttgtgtaatcataattcatagtatacgattcatcattcactatgtctacaggcaagatattggaattgttcacgattccctgaagtttctttgtttttgttgataccaccatattgcagcttatagtgactaagttaatgaatgtttccaaaaaattagtcatataaattcttcttctctctctattacataaactctttttctctttctaactatcatgttcatgtctaaaacttatacatgctcacatcattgttcgtttcagctgacttacttctgtaagagagctatctagttaacaactcttgtaacattttatttgctagtcagaacatggattggtgcaagcatgggaatttgccaacactctaccaaatcgattggagtttggacttagtttcaccagaagccatacccggacacttactggggactgtcaacaaagccgcattatgatgtacttggatgtttcacgtgcctgaggtgtgagttacttggaagggaagcggtttatttaattgttttcctaagtagattttgcttagaagcttttacttttcacttgaaagggtttttcttgttttaagcttttcgaattagagtttcggttgcattaagagtagtcgtattagtctttttttacctaaggaagacttttttgtaattttcagacgatgcaattcaacttttcgagtgttttgttgcttgtgtgattgtgagtttgtgaatttgtctttcataaatattgagttcatcagaagctttatgctccaccggtagtctagtaccttttgttattgttcagggaagtaatctggtaccttctatatatatgagaaaacatacattatgcaaaattcttacaggttagttacttcctagaacttcagttatactttttttttgttccatgtccttggaatcaagtcattccctctgaaaaatgtgtactgaacttttgaaagttgctgtttgattcctgtttgaatcttcacttttcttgcatcgtgacagctgtgtttacaatgaagtttaagcagacactctctttatatagtgcctccttttggagcatcggagagttgtggctgatcactatgtgcgaccaagagattcattaatcgcgtgtttgatcaggtaaaagtttttatgtcaatgtgttttatttttctttctgtttgatcagtttatgtctgtattcagattcttatcttcttctagtagcataacaaatttgtttgtttcattatataaaccgtttcaggattacaaatgatcggacagagatgtatgcttcagtcgatattgatgataacttaaggtagtattgctagaacagttacagagctgtggctgatcactatgtgctgcaaacagattcatcaatcacgtgtttgataaggtagagttttcatgtcaacgcgttttttctgtttgatcaatttatgtctgtattcagattcttatctacttctagtagcataacatatctgtttctatcattatataattgtttcagggttacaaatgaccggacagagatgtatgcttcagtcgatattgatgctaacttaagatagcattgctagaacagtttcaggttgccattgaaatttgaaaacagaaagacaccatcaggtagagttttcatgtcaatgctttttttttttttgatcaatttatgtttgtataaaaatttgtatcttcttctatactataaattctatataacgtatctgtttatttcattataataaaccgtttcaggattacaaatgatcgaacagtgatgtatgcttcagtcgataacttcaggtagcattgccagaagaattgcagacacatcctaacttaagagggttatggttgattgactaactctcgaaattctagttaggcaagaggagcattgcagtacctgccttaaaaggggtcgtcttatatagatatctctatcagtagtcatttacgtcttaagtcctgaaataagttgaactaaacatactttgtttgaatcgaagatttagtgaattttactttgtatttgattgtgttgagatgaccgtagggaaaagttaactaattataagcgtaaattatgttcttggattcggcttttatattttcttttcgtttaataaaagtggtcatagagatattctacaatgtattttggtaagttacctaaaatttaatttgattatttttcacataattaatcaactgataaaattttatttggatcaaccgatcaagaagtgaaaacgtaaagaacaaaaagaaacagaggga

SEQ ID NO: 51 - DNA, 2001 bp, Spinacia oleracea
aaaaaaaaattacttatttcttctatttttacttgttacacttttctacaacagaaacatcaaaacgcccgcaacacactataaatgaaaaaccattttgtatgcaatgatatttacgttctcactttattctctttaataactcctactacgtaattctcaccaatcaaataaaattatagaaattttcatttataccctcttaaaatgatgttgatttctttttttttttttttaaggtgtgaaaaagtttgtgttataagttacaacaatttaaaaacggagaacatacttataatactagtgtaatctttggccggattatggtcgttgacaaaaaaactccggccttgaccctccacgtgccggtcaagtgacttaataaaccttttattccacccttttttcattcttctttttattcttctttttctctccattaatacaaatcaagtgattatgtcgatccgatccttctgttctctactgtaattgattacaccaacaacaaccaagcgaaacagtcaatgttaccgaattgaattgcggaaaatagtttatgattgattcattaaaaaaggatggagttttgtggatttgaataagacaacgaattgagattcctggggttttctttctgttggggttggatttcatgtacttgttgatgatcaaatatgtgattgaagattgaagatgatgatgtgtttatgggtttgaaatcggattaaatttatgggaaatgtaagtgaattggggatgcacataaggtgtttgatgaaatgtctatgagaaatattgtttcttgcacttgtatgataatttgtggggatttgattagttcatggtgcgagtttgatgcaacgccgaagagaaatcaggtctttagagaaactcaaatggttgaataggcttccaacaatgttgtttcgtagtacactgccatgattgatagagaaggaagcagatgaaggagaaggctcatgtgaccggcacatgggtagtaagtcaacgccggaaatcgtggtcaacgtccaaaaccgagctaaggtaacatattggagtacaagtaattacaacaaaaagtgttacttccttgtacattattattttacttgaaatgctagttgtgtttgtgcatctgtggaactctaaattaattaattaacaatcaaccaaacaactttagtgtaaattggccaaccttttgccatcagccacagaaaagtgaaatatcaccccattattgcccattctgtatttgcacttttttttaaggcatagcacagccggttttccggatcttagctccgtctacattcggatccgatccatttcgcacaccttatttgtggtggatgagtctcccaacaagaatttctcgctcgaaactgagaacccccttaagcggcatcaagttgcttaccacttgagccaactctatgttggtttctgcatttgcagttagttaggtcgtctgagtgcgaaatgggaatgctttatcacacactccacagtttagtcaggctgatggaaacgtaataattgagttatttgagtgttcaaacttaaagtcactcactcactcaaacactcaatactttctccatcttgttttctcattacatatgaaaacccaaacacctttcatttctgcttaatcttctttctctcatctttcagttattcacctgttcatctttctgaaaacaacccaaacacccttcatttctgtttaatcttctttcctcatcttcatccacctgtttatctttctgtaaacacaacccaaacacctttcatttctgatttatcttgttatctcatcttcattcacctgttcatctttctgaaaatctaaacacccttcatttctgctaatcttcttttctcatctccccctaaatcatctttctgaaaacccaaacacctttcttttctgcttttatcttgttttctcatcttaattcatctcttcatctttctgaaaaacccaaccca

SEQ ID NO: 52 - DNA, 3429 bp, Spinacia oleracea
atggctgaaatcggatactcggtttgttcaaaacttattgaagtgatgggcagtaatatcattaaagagattcgcgacatgtggggttacaattctcatcttgaagacctcaacaaatctgtcttgacgatcaaggatgtgctcttggatgctgaggcgaagcgggatctttcccgtgaacaacagagttacattgcagaacttaaggatgttgtttacgatgctgatgatttgttcgatgagttcctcactcttgctgagctcaaacagattgatggaaacaagggtggtggtaaattctccaaaaaggtacgtcgtttcttttcttctaataaggagaagatgggtcaagcttacaagatgtctcatatggttaaagaaattaagaagcagttgggtgaaattgttgataggtataccaaatttgggtttattgttgattataaacctattattaggagaagggaggaaacatgttcttattttgtaggtgccaaggagattgttgggagggataaggataaagatgttatcataggcatgttgctagatcatgataacgattgtagtttcttggctgttgtgggggttggaggggtgggaaaaactactcttgcccaacttgtgtataatgatgaaagagtcaaaagtgagttccaagatttgaggtattgggtttgtgtctctgatcaagatgggggacaatttgatgacaaaagaattctttgtaagattatagagttagttacgggccagattcctccgagtaacgagagcatggaatcggtgcgtaagaaatttcaagaggaattaggaggaaagaagtacttccttgttcttgatgatgtatggaacgaggatcgccagaagtggcttcatctagaaaatttcttgaaattgggtcaagggggaagcaaggttgtggtaaccacacgttcagagaagacggcaaatgttatagggaaaagacaagactataaactagaatgtttgtcagcagaggattcatggcgcttatttgaaatgtcagcttttgacgaagggcatggccaggaaaactatgacgaattagtgacgattggcaagaagattgttgaaaaatgttataacaatccacttgctataacagtggtaggaagccttctttttggacaagagataaataagtggcggtcgtttgaaaacagtggattagcccaaattgccaatggtgataatcagattttcccgatattaaagctcagttaccacaatcttccacactccttgaagagctgctttagctattgtgcagtgtttcccaaagataatgaaataaagaaggagatgttgattgatctttggatagcacaaggatacattataccgttggatggaggtcaaagtatagaagatgctgccgaggaacattttgtaattttgttaagaagatgtttctttcaagatgtaaagaaggattctcttggtaatgttgattatgttaaaatccacgacttaatgcacgatgtcgctcaagaagtggggaaggaggaaatttgtgtagtgacttcaggtacaaagaagttggctgataaaatccgtcacgtgggttgtgttgtcgatagagatccagaaatagtctttttatgtagcaataagattcgttcgtatattagcggtcgttgtataaagaatccggtggattcacaaatagacaactggatgcgccttagggtgttggacttgtcagattcatgtgttaaagatttgtctgattcaataggtaagctgctgcacttaaggtatcttaacctctcttctaatataaagttggagataatccctgatgcaattacaagactgcataacttgcagacactacttttagaagattgcagaagtttaaaggagttgccaaaagatttttgcaaattggtcaaactgaggcacttggaattacagggttgtcatgatttgattggtatgccatttggaatggataagctaactagtcttagaatactaccaaacattgtggtgggtaggaaggaacaaagtgatgatgagctgaaagccctaaaaggcctcatcgagataaaaggctccatttctatcagaatctattcaaagtatagaatagttgaaggcatgaatgacacaggaggagctgcttatttgaagagcatgaaacatctcagggagattgatattacatttttgggtgaatgtgttagccctgaagctgtattggaaaccttagagccaccttcaaatatcaagagcttatatatatataattacagtggtacaacaattccagtatggggaagagcagagattaattgggcaatctccctctcacatctcgtcgacatccagcttagttgttgtagtaatttgcaggagatgccagtgctgagtaaactgcctcatttgaaatcgctgaaacttggatggttggataacttagagtacatggagagtagcagtagcagtgacacagaagcagcaacaccagaattaccaacattcttcccttcccttgaaaaacttactttacagcatctggaaaagttgaagggttttgggaacaggagatcgagtagttttccccgcctctctgaattggaaatcaagaaatgcccagatctaacgtcatttccttcttgtccaagccttgagaagttggaattgaaagaaagcaatgaagcgttgcaaataatagtaaaaataacaacaagaggtaaagaaaaagaagagaacaataatgctggtgttggaaattcacaagatgatgacaaagtcaaattacggaagatggtgatagacaatctgggttatctcaaatcactgcccacaaattgtcttactcaccttgaaattgaggagtttattgaatcagattccgaggaagagattgaatcagaagtcggggaggaggaggttgaattggaagttgtggaggcatttcagaagtctgcatcttctctgcaaagcctcgaaatatacagaataaataaactgaatagactaactggaacaacaggattagtgcatttcagtgccttggacgaactcacattgaattttgtcgacgattttgaagtatcctttcctcaaagcctccgcagtttgaaaattgaatactcttataaaatgacaagtctgcccatggggatgcagtacttaacctccctccaaaccctcgaactaaaatgttgtgatgaattgaattcccttccagaatggataagcaacttatcatctcttcaatccctgtccatatcctactgtgaagccctgaaatcactaccagaagcaatgcagaacctcacctcccttcagagacttgtgataagagaatgtcgagacctagctgaaagatgcgaagaacccaatggggaagactatcacaaaattcaacacatccccaaaattgaaatatggtag

SEQ ID NO: 53 - protein, 1142 aa, Spinacia oleracea
MAEIGYSVCSKLIEVMGSNIIKEIRDMWGYNSHLEDLNKSVLTIKDVLLDAEAKRDLSREQQSYIAELKDVVYDADDLFDEFLTLAELKQIDGNKGGGKFSKKVRRFFSSNKEKMGQAYKMSHMVKEIKKQLGEIVDRYTKFGFIVDYKPIIRRREETCSYFVGAKEIVGRDKDKDVIIGMLLDHDNDCSFLAVVGVGGVGKTTLAQLVYNDERVKSEFQDLRYWVCVSDQDGGQFDDKRILCKIIELVTGQIPPSNESMESVRKKFQEELGGKKYFLVLDDVWNEDRQKWLHLENFLKLGQGGSKVVVTTRSEKTANVIGKRQDYKLECLSAEDSWRLFEMSAFDEGHGQENYDELVTIGKKIVEKCYNNPLAITVVGSLLFGQEINKWRSFENSGLAQIANGDNQIFPILKLSYHNLPHSLKSCFSYCAVFPKDNEIKKEMLIDLWIAQGYIIPLDGGQSIEDAAEEHFVILLRRCFFQDVKKDSLGNVDYVKIHDLMHDVAQEVGKEEICVVTSGTKKLADKIRHVGCVVDRDPEIVFLCSNKIRSYISGRCIKNPVDSQIDNWMRLRVLDLSDSCVKDLSDSIGKLLHLRYLNLSSNIKLEIIPDAITRLHNLQTLLLEDCRSLKELPKDFCKLVKLRHLELQGCHDLIGMPFGMDKLTSLRILPNIVVGRKEQSDDELKALKGLIEIKGSISIRIYSKYRIVEGMNDTGGAAYLKSMKHLREIDITFLGECVSPEAVLETLEPPSNIKSLYIYNYSGTTIPVWGRAEINWAISLSHLVDIQLSCCSNLQEMPVLSKLPHLKSLKLGWLDNLEYMESSSSSDTEAATPELPTFFPSLEKLTLQHLEKLKGFGNRRSSSFPRLSELEIKKCPDLTSFPSCPSLEKLELKESNEALQIIVKITTRGKEKEENNNAGVGNSQDDDKVKLRKMVIDNLGYLKSLPTNCLTHLEIEEFIESDSEEEIESEVGEEEVELEVVEAFQKSASSLQSLEIYRINKLNRLTGTTGLVHFSALDELTLNFVDDFEVSFPQSLRSLKIEYSYKMTSLPMGMQYLTSLQTLELKCCDELNSLPEWISNLSSLQSLSISYCEALKSLPEAMQNLTSLQRLVIRECRDLAERCEEPNGEDYHKIQHIPKIEIW

SEQ ID NO: 54 - DNA, 7190 bp, Spinacia oleracea
atggccgaaatcggatactcggtttgtgcgaaactcatcgaagtgattggcagtgagctgatcaaagagatttgtgacacatggggttacaaatctcttcttgaggacctcaacaaaactgtattgacggtcaggaacgttctcattcaagccggggtgatgcgggagcttactagtgaacaacaaggtttcattgcagaccttaaagatgttgtttatgatgctgatgacttgttcgacaagttactcactcgtgctgagcgaaaacagattgatggaaacgaaatctctgaaaaggtacgtcgtttcttttcctctagtaacaagatcggtcaagcttactacatgtctcgtaaggttaaggaaattaagaagcagttggatgaaattgttgataggcatacaaaatttgggtttagtgctgagtttatacctgtttgtaggggaaggggaaacgagagggaaacacgttcatatatagatgtcaagaatattcttgggagggataaagataagaatgatatcatagataggttgcttaatcgtaatggtaatgaagcttgtagtttcctgaccatagtgggagcgggaggattgggaaaaactgctcttgcacaacttgtgttcaatgatgaaagggtcaaaattgagttccatgatttgaggtattgggtttgtgtctctgatcaagatgggggccaatttgatgtgaaagaaatcctttgtaagattttagaggtggttactaaggagaaagttgataatagttccacattggaattggtacaaagccaatttcaagagaagttaagaggaaagaagtacttccttgttcttgatgatgtatggaacgaagatcgtgagaagtggcttcctttggaagagttgttaatgttgggtcaagggggaagcaaggttgtagtgaccacacgttcagagaagacagcaaatgtcatagggaaaagacatttttatacactggaatgtttgtcaccagattattcatggagcttatttgaaatgtcggcttttcagaaagggcatgagcaggaaaaccatcacgaactagttgatattgggaaaaagattgttgaaaaatgttataacaatccacttgctataacggtggtaggaagtcttctttatggagaggagataagtaagtggcggtcatttgaaatgagtgagttggccaaaattggcaatggggataataagattttgccgatattaaagctcagttaccataatcttataccctcgttgaagagttgttttagttattgtgcagtgtttcccaaggatcatgaaataaagaaggagatgttgattgaactttggatggcacaaggatatgttgtgccgttggatggaggtcaaagtatagaagatgctgccgaggaacattttgtaattttgttacgaaggtgtttctttcaagatgtaaagaaggataaatatggtgatgttgattctgttaaaatccacgacttgatgcacgatgtcgcccaagaagtggggagggaggaattatgtgtagtgaatgataatacaaagaacttgggtgataaaatccgtcatgtacatcgtgatgtcattagatatgcacaaagagtctctctgtgtagccatagccataagattcgttcgtatattggtggtaattgtgaaaaacgttgtgtggatacactaatagacaagtggatgtgtcttaggatgttggacttgtcatggtcggatgttaaaaatttgcctaattcaataggtaaattgttgcacttgaggtgtcttaacctgtcttataataaagatctgttgatactccctgatgcaattacaagactgcataatttgcagacactgcttttaaaagagtgcagaagtttaaaggagttgccaaaagatttttgcaaattggtcaaactgaggcacttggatttaaggtgttctgatttgaaggagttgccaaaagatttttgcaaattggtcaaactgaggcacttggatttatggggttgtgatgatttgattggtgtgccattgggaatggataggctaattagtcttagagtactgccattctttgtggtgggtaggaaggaacaaagtgatgatgatgagctgaaagccctaaaaggcctcaccgagataaaaggctccattcgtattagaatctattcaaagtatagaatagttgaaggcatgaatgacacaggaggagctgggtatttaaagagcatgaaacatctcacgggggttgatattacatttgatggtggatgtgttaaccctgaagctgtgttggcaaccctagagccaccttcaaatatcaagaggttagagatgtggcattacagtggtacaacaattccagtatggggaagagcagagattaattgggcaatctccctctcacatcttgtcgacatccagctttggcattgtcgtaatttgcaggagatgccagtgctgagtaaactgcctcatttgaaatcactggaactttataatttgattagtttagagtacatggagagcacaagcagaagcagtagcagtgacacagaagcagcaacaccagaattaccaacattcttcccttcccttgaaaaacttagactttggcgtctggacaagttgaagggttttgggaacaggagatcgagtagttttccccgcctctctaaattggaaatctggaaatgcccagatctaacgtcatttccttcttgtccaagccttgaagagttggaattgaaagaaaacaatgaagcattgcaaataatagtaaaaataacaacaacaagaggtaaagaagaaaaagaagaagacaagaatgctggtgttggaaattcacaagatgatgacaatgtcaaattacggaaggtggaaatagacaatgtgagttatctcaaatcactgcccacaaattgtcttactcacctcgaccttacaataagagattccaaggagggggagggtgaatgggaagttggggatgcatttcagaagtgtgtatcttctttgagaagcctcaccataatcggaaatcacggaataaataaagtgaagagactgtctggaagaacagggttggagcatttcactctgttggaatcactcaaactttcagatatagaagaccaggaagatgagggcgaagacaacatcatattctggaaatcctttcctcaaaacctccgcagtttgagaattaaagactctgacaaaatgacaagtttgcccatggggatgcagtacttaacctccctccaaaccctctatctacaccattgttatgaattgaattcccttccagaatggataagcagcttatcatctcttcaatccctgcacataggaaaatgtccagccctaaaatcactaccagaagcaatgcggaacctcacctcccttcagagacttacgatatggcagtgtccagacctaattgaaagatgcgaagaacccaacggcgaggactatcccaaaattcaacacatccccaaaattgtaagtcattgcagaaagtaatttattcatttatatttattttatgcttagaatgatatacaccgtcgtcctttggtttcaaatcttgaatttggtttttgttttctttctttgtttctttattcaacaccagcccatttatgattgattcattaaaaaaaggatggagttttgtggatttgaagaagacaacgaattgagattcctggggttttctttttgttggggttggatttcatgtatatgttgctgattaaatacgagactgatgatgatgatgatgatgtgtttatgggttttaaatcagattaaatatatgggaaatgtaagttaatttgggatgcacataaggtgtttgctgaaatgtctatgagaaatgttgtttcttggacttagaatgatatacactgtcgtccattggtttccaatcttacatttggtttgtgttttcttagtttgtttctttaatcaacaccaacccatttttttaaaactacctgcaactactaatttacgttgaccctgtatctcaggtactaaatgaatattggtgattttcagttactcaacactagcttgatcctgaacgcacccaaccttcaggttagaatccggcttactcatccttttgtccagttttcaagtaattgttttggcaggatcaattctctaattgttgtacaccgtatattgcaatttatagtgactacagttaatgaatgtttacaaaaaattagtcatgtaaaaacttcttctctgtccattacataaactctttttctctttctaacttatcatgttcatgtctaaaaaattaaacatgctcacatcaatgttcatttaagctaacttacttctgtaagagagcgagctagttaaaaactcctttaactttctgttttatactcaggacatggattgatgcaagcatgaagaacttcgggaatttgctaaaactctaccaaagcgatgagagtttggactttgtttcacttgaagtcagggactgtcaacaaagccacagtgtgcatgttggctgtttcacttggacgataaaaaggtttatttaattgttttcctaagtgtatttggcttacaagcttttacttttcgcttgaaagggtttttcttgttttaagctttttgaattagagtttcggttgaagtaagagtagtcgtattagtcttttactttgcaggagtctatgcctatataaggtaagactcgtatttgtaattttcagattatgcaattcaagttttcgagtgttttcttaaaaaaacatatcatacctgtgtgtagcataaagataaattctgatgctgtgcttcttgttatggctcacattggttttcattgtttggattgtttcacagggaagcagagaatacctggaacctgtaaaggacgctatatctatagcagctttcacaggccaagtaatataatgttctttatcaatcactcaatacctggagattgtttgaacacataattcacctctttttttccatctcaaattgcagacttttactgggatttgaatgacagcaaacatttgattgtcacgaggattgatctaactggtgaatgttgtgatcaccatattggtctttctcattcaaacaaacttgcataccgttcttttgaagtttgaagacaagcaggcgataatcaactcaggtcgaagctcatgtgcaggagagaatagaatatagaggagattatttttaaaagaaacgctcaaaggtattgtagcacctttcctatttgctactgcagtgatgtttttatttcttgtttgcagcgcttgtttctcatatttcaacctacttttagaaaaaaaaacatctccgaacataaccaaaaataaagttcccttatcagtgctttccctgctttcttctaaacaacatatacaattataaaccctttttctctcttacctttgttattcttccttgcttcattgagataacactctcctgtttttgttttgttgttagtcattacatggatatatcaaggacaacagttctgtagtccgtcaactgtggttaggaaggctaaactggagcacaataaccccatgtcaattgaatagtaaaggtgtgctatatcagtttcgtttggcttggcttacctgaaaaatggctggttatttatccttgtctctttctatgacgtgcagtggcttgttaatgtgtctcggacaacaattcctcactttccaagttccatacacgctgatgtaactatcttctgcagtctgttctttcatttttgccacgtgctctaattataactttttgtactcaataatcaactccttgtcccggtatttgcagagactacttaaacaggtaaagtgacaatcctggcgaagttgtctgtttcttagctctgaacccatcattcaggtaagattaagtatttaagaagaaattttgtttttacctaaaatgaatgatcttgtgtaactgcttgcttcttgcattaaataagaactttctgctgcatatgtgacagttacatccacaaaaaagttggaggtttgttcagggattggaaatgaaggtacttcagaattcctggaatgtttatgaatgctccagacttcagagtctttaatggaaaattcgagtcactaaaaaaacattattcctatcatcagagctttgaagttcctctatacaaggtcaactgagttcctctttgcctcttgtttaattgtatttacttgtaccttaattataatctgtatattgttttagttaagttctaaaacaggttattattcatcatttgtgcagcatattgctggaatcaagaatctagtgcttcttcttcctgacttcactgtcaaaatagcagttcccatgctggaaataagcgcgctagcaatgtaattgatgacatggatgttgctgcttctgagttttgatcataaaaagctgttatgtgtttcttgaatgtaatgaaggagaggagaaaactgaaaactcttggcaaaaacgtgaaattgcagtgcctcggggtggtagggatcacccggattcagttcagacgatacttttttcaacccggtttgttccggttttcagcttcgggttttccttgtacttttggggcacacatacaaggctacttcatgtttgagaaacctaattgaggctatcttgtagcaaatgcacaccacactctttctctcttctctccttttttcaccttccatttgtaaaaatcctcttttaaaggttaataaaaaaaagcttcaagtctcgtagggtggatgtaggtcacattgaccgaaccacggtaaactctttgtgttctttcttctctctttgtttctcatttttacggcaagtgtttatggttaaccatgcatcttagaatagcttaaggcattaacataataacatcaatgttctccaaagattcaccttacttgttgtacataatcacaatgttaagcctatgaaggtagaatgctctcatgatttggtttaaccaaaaaataaactctaaaataatacggagtaataaaaattggccataaattatttacaaagtttgatttttgtatagggtatcttgtacttgtgataaaaaaaattaaaaaaaaaaaaattacttatttcttctatttttacttgttacacttttctacaac

SEQ ID NO: 55 - DNA, 2000 bp, Spinacia oleracea
tgcacagtgcctttagcggtattgaactattaacctcgaggttggaaagtataattcttatcacgactctttgaagttaggcttaacttgctcaccgattcttaaatagacccggcttatactaaatttattgtgtactatgcctagaaagtaaggtcaacaactttcttctaaatttttttggcatgtttataagggttattatgaaaaacatatcaaattggtgttgttagttaggcttgaataatatagacttttaaaaaattaggctaatttgatttaaaaaattgttacatatctaagaaaattgatgttaaatttatcagtcactgtataaacaataaaagtcaatatgtatgtaaaagggttgttagataaaatttttggctttttggtccacagtaagaggaactccaatgcttagttacaaggtggtgtagttaaatttgctacaaggttgtgtagttaaagagtaactccaatatattatagttaaatttaccacattaaatttctagctacaatatatttaagctataaagtttctcattggttgactataatacgttatagcaccttataatattttatttaatatacaattttatgtattttaccttttttacatttttttcgtgatctacctgctcagatgagccacactaatttggtagctgcttatacaattcttgtatcaacggttggctacttgttcaaatatttttatttttttacgagtaagtcattttatgatcattgaagttgctctaatattatcatggacctattaacgcatgaataattaactcggtaggaattagtttcaaaataaaattcccctcacaaaaaaatcagaaaaccaaccttctccagtttactgttgtctaaagccaaagagcatggaattttccagtaatcgcagaccccaaattctcttctccaatcgtccctgtcaatttcagcaattgaataaatcgttgattttaggatttgccgccaaaaaaatgaaaaatccatgaattttagggttcaaatttgatccgtaattgggaaaattttcagcaattgatcttccaaatcattcatacttgtttccagactgcaaatgaaaggtgcgaactttatactgcattttgattttccattactgtaatttattaagatgaactgcattttgcaattgttttattcgactactcatctttaaatcaaattgctaaattgctagctaattttcttatcatattgccaaaaatttgttgcttaaatgattccatttctctaattatttttgttttattggtagataaataattaaatatcagccccattaattgaatattcaaaggaaatgtatggtccaaaaatggcgtttaatagtcaatgccgtgttttatggggtggtggagtactatatgactgtgtgtggacttggagaagactagagagtattgattatcaaaatatggaccctgaaaatgaaaatgaaaatgaaaatgatgtttttacactttaaaatcgtcaaaaaacaaaaatcctccttagcaatagtatttacacgtgctatttgcacggacttcaatgcaatagtgtaaatttacggtcaaagttttcattctaaagcgtaaataactttcatgaatggaggacggtagtataagtataacgttatagcctacaattttcttatcatattcatataaatttgtttctaaaagttgttttacttggctaaaatacttttgttcttattggcagataaacatcagtccattattggccaacttgctgagtccattattggccaacttgaacatatacctccaaacaataatcaataatgtcgattatgaagtttgtgaatgcaatttattatcactttcatttataaaatgactacttgattaacacatacaatattacctttctccaaacaccctttcaattctgcttaatcttgttttctcatcatctcttcatctttctgaaaacacaaccca

SEQ ID NO: 56 - DNA, 3534 bp, Spinacia oleracea
atggccgaaatcggatactcggtttgtgcgaaactcatcgaagtgattggcagtgagctgatcaaagagatttgtgacacatggggttacaaatctcttcttgaggacctcaacaaaactgtattgacggtcaggaacgttctcattcaagccggggtgatgcgggagcttactagtgaacaacaaggtttcattgcagaccttaaagatgttgtttatgatgctgatgacttgttcgacaagttactcactcgtgctgagcgaaaacagattgatggaaacgaaatctctgaaaaggtacgtcgtttcttttcctctagtaacaagatcggtcaagcttactacatgtctcgtaaggttaaggaaattaagaagcagttggatgaaattgttgataggcatacaaaatttgggtttagtgctgagtttatacctgtttgtaggggaaggggaaacgagagggaaacacgttcatatatagatgtcaagaatattcttgggagggataaagataagaatgatatcatagataggttgcttaatcgtaatggtaatgaagcttgtagtttcctgaccatagtgggagcgggaggattgggaaaaactgctcttgcacaacttgtgttcaatgatgaaagggtcaaaattgagttccatgatttgaggtattgggtttgtgtctctgatcaagatgggggccaatttgatgtgaaagaaatcctttgtaagattttagaggtggttactaaggagaaagttgataatagttccacattggaattggtacaaagccaatttcaagagaagttaagaggaaagaagtacttccttgttcttgatgatgtatggaacgaagatcgtgagaagtggcttcctttggaagagttgttaatgttgggtcaagggggaagcaaggttgtagtgaccacacgttcagagaagacagcaaatgtcatagggaaaagacatttttatacactggaatgtttgtcaccagattattcatggagcttatttgaaatgtcggcttttcagaaagggcatgagcaggaaaaccatcacgaactagttgatattgggaaaaagattgttgaaaaatgttataacaatccacttgctataacggtggtaggaagtcttctttatggagaggagataagtaagtggcggtcatttgaaatgagtgagttggccaaaattggcaatggggataataagattttgccgatattaaagctcagttaccataatcttataccctcgttgaagagttgttttagttattgtgcagtgtttcccaaggatcatgaaataaagaaggagatgttgattgaactttggatggcacaaggatatgttgtgccgttggatggaggtcaaagtatagaagatgctgccgaggaacattttgtaattttgttacgaaggtgtttctttcaagatgtaaagaaggataaatatggtgatgttgattctgttaaaatccacgacttgatgcacgatgtcgcccaagaagtggggagggaggaattatgtgtagtgaatgataatacaaagaacttgggtgataaaatccgtcatgtacatcgtgatgtcattagatatgcacaaagagtctctctgtgtagccatagccataagattcgttcgtatattggtggtaattgtgaaaaacgttgtgtggatacactaatagacaagtggatgtgtcttaggatgttggacttgtcatggtcggatgttaaaaatttgcctaattcaataggtaaattgttgcacttgaggtgtcttaacctgtcttataataaagatctgttgatactccctgatgcaattacaagactgcataatttgcagacactgcttttaaaagagtgcagaagtttaaaggagttgccaaaagatttttgcaaattggtcaaactgaggcacttggatttaaggtgttctgatttgaaggagttgccaaaagatttttgcaaattggtcaaactgaggcacttggatttatggggttgtgatgatttgattggtgtgccattgggaatggataggctaattagtcttagagtactgccattctttgtggtgggtaggaaggaacaaagtgatgatgatgagctgaaagccctaaaaggcctcaccgagataaaaggctccattcgtattagaatctattcaaagtatagaatagttgaaggcatgaatgacacaggaggagctgggtatttaaagagcatgaaacatctcacgggggttgatattacatttgatggtggatgtgttaaccctgaagctgtgttggcaaccctagagccaccttcaaatatcaagaggttagagatgtggcattacagtggtacaacaattccagtatggggaagagcagagattaattgggcaatctccctctcacatcttgtcgacatccagctttggcattgtcgtaatttgcaggagatgccagtgctgagtaaactgcctcatttgaaatcactggaactttataatttgattagtttagagtacatggagagcacaagcagaagcagtagcagtgacacagaagcagcaacaccagaattaccaacattcttcccttcccttgaaaaacttagactttggcgtctggacaagttgaagggttttgggaacaggagatcgagtagttttccccgcctctctaaattggaaatctggaaatgcccagatctaacgtcatttccttcttgtccaagccttgaagagttggaattgaaagaaaacaatgaagcattgcaaataatagtaaaaataacaacaacaagaggtaaagaagaaaaagaagaagacaagaatgctggtgttggaaattcacaagatgatgacaatgtcaaattacggaaggtggaaatagacaatgtgagttatctcaaatcactgcccacaaattgtcttactcacctcgaccttacaataagagattccaaggagggggagggtgaatgggaagttggggatgcatttcagaagtgtgtatcttctttgagaagcctcaccataatcggaaatcacggaataaataaagtgaagagactgtctggaagaacagggttggagcatttcactctgttggaatcactcaaactttcagatatagaagaccaggaagatgagggcgaagacaacatcatattctggaaatcctttcctcaaaacctccgcagtttgagaattaaagactctgacaaaatgacaagtttgcccatggggatgcagtacttaacctccctccaaaccctctatctacaccattgttatgaattgaattcccttccagaatggataagcagcttatcatctcttcaatccctgcacataggaaaatgtccagccctaaaatcactaccagaagcaatgcggaacctcacctcccttcagagacttacgatatggcagtgtccagacctaattgaaagatgcgaagaacccaacggcgaggactatcccaaaattcaacacatccccaaaattgtactaaatgaatattggtga

SEQ ID NO: 57 - DNA, 3567 bp, Spinacia oleracea
atggccgaaatcggatactcggtttgtgcgaaactcatcgaagtgattggcagtgagctgatcaaagagatttgtgacacatggggttacaaatctcttcttgaggacctcaacaaaactgtattgacggtcaggaacgttctcattcaagccggggtgatgcgggagcttactagtgaacaacaaggtttcattgcagaccttaaagatgttgtttatgatgctgatgacttgttcgacaagttactcactcgtgctgagcgaaaacagattgatggaaacgaaatctctgaaaaggtacgtcgtttcttttcctctagtaacaagatcggtcaagcttactacatgtctcgtaaggttaaggaaattaagaagcagttggatgaaattgttgataggcatacaaaatttgggtttagtgctgagtttatacctgtttgtaggggaaggggaaacgagagggaaacacgttcatatatagatgtcaagaatattcttgggagggataaagataagaatgatatcatagataggttgcttaatcgtaatggtaatgaagcttgtagtttcctgaccatagtgggagcgggaggattgggaaaaactgctcttgcacaacttgtgttcaatgatgaaagggtcaaaattgagttccatgatttgaggtattgggtttgtgtctctgatcaagatgggggccaatttgatgtgaaagaaatcctttgtaagattttagaggtggttactaaggagaaagttgataatagttccacattggaattggtacaaagccaatttcaagagaagttaagaggaaagaagtacttccttgttcttgatgatgtatggaacgaagatcgtgagaagtggcttcctttggaagagttgttaatgttgggtcaagggggaagcaaggttgtagtgaccacacgttcagagaagacagcaaatgtcatagggaaaagacatttttatacactggaatgtttgtcaccagattattcatggagcttatttgaaatgtcggcttttcagaaagggcatgagcaggaaaaccatcacgaactagttgatattgggaaaaagattgttgaaaaatgttataacaatccacttgctataacggtggtaggaagtcttctttatggagaggagataagtaagtggcggtcatttgaaatgagtgagttggccaaaattggcaatggggataataagattttgccgatattaaagctcagttaccataatcttataccctcgttgaagagttgttttagttattgtgcagtgtttcccaaggatcatgaaataaagaaggagatgttgattgaactttggatggcacaaggatatgttgtgccgttggatggaggtcaaagtatagaagatgctgccgaggaacattttgtaattttgttacgaaggtgtttctttcaagatgtaaagaaggataaatatggtgatgttgattctgttaaaatccacgacttgatgcacgatgtcgcccaagaagtggggagggaggaattatgtgtagtgaatgataatacaaagaacttgggtgataaaatccgtcatgtacatcgtgatgtcattagatatgcacaaagagtctctctgtgtagccatagccataagattcgttcgtatattggtggtaattgtgaaaaacgttgtgtggatacactaatagacaagtggatgtgtcttaggatgttggacttgtcatggtcggatgttaaaaatttgcctaattcaataggtaaattgttgcacttgaggtgtcttaacctgtcttataataaagatctgttgatactccctgatgcaattacaagactgcataatttgcagacactgcttttaaaagagtgcagaagtttaaaggagttgccaaaagatttttgcaaattggtcaaactgaggcacttggatttaaggtgttctgatttgaaggagttgccaaaagatttttgcaaattggtcaaactgaggcacttggatttatggggttgtgatgatttgattggtgtgccattgggaatggataggctaattagtcttagagtactgccattctttgtggtgggtaggaaggaacaaagtgatgatgatgagctgaaagccctaaaaggcctcaccgagataaaaggctccattcgtattagaatctattcaaagtatagaatagttgaaggcatgaatgacacaggaggagctgggtatttaaagagcatgaaacatctcacgggggttgatattacatttgatggtggatgtgttaaccctgaagctgtgttggcaaccctagagccaccttcaaatatcaagaggttagagatgtggcattacagtggtacaacaattccagtatggggaagagcagagattaattgggcaatctccctctcacatcttgtcgacatccagctttggcattgtcgtaatttgcaggagatgccagtgctgagtaaactgcctcatttgaaatcactggaactttataatttgattagtttagagtacatggagagcacaagcagaagcagtagcagtgacacagaagcagcaacaccagaattaccaacattcttcccttcccttgaaaaacttagactttggcgtctggacaagttgaagggttttgggaacaggagatcgagtagttttccccgcctctctaaattggaaatctggaaatgcccagatctaacgtcatttccttcttgtccaagccttgaagagttggaattgaaagaaaacaatgaagcattgcaaataatagtaaaaataacaacaacaagaggtaaagaagaaaaagaagaagacaagaatgctggtgttggaaattcacaagatgatgacaatgtcaaattacggaaggtggaaatagacaatgtgagttatctcaaatcactgcccacaaattgtcttactcacctcgaccttacaataagagattccaaggagggggagggtgaatgggaagttggggatgcatttcagaagtgtgtatcttctttgagaagcctcaccataatcggaaatcacggaataaataaagtgaagagactgtctggaagaacagggttggagcatttcactctgttggaatcactcaaactttcagatatagaagaccaggaagatgagggcgaagacaacatcatattctggaaatcctttcctcaaaacctccgcagtttgagaattaaagactctgacaaaatgacaagtttgcccatggggatgcagtacttaacctccctccaaaccctctatctacaccattgttatgaattgaattcccttccagaatggataagcagcttatcatctcttcaatccctgcacataggaaaatgtccagccctaaaatcactaccagaagcaatgcggaacctcacctcccttcagagacttacgatatggcagtgtccagacctaattgaaagatgcgaagaacccaacggcgaggactatcccaaaattcaacacatccccaaaattttactcaacactagcttgatcctgaacgcacccaaccttcaggacatggattga

SEQ ID NO: 58 - protein, 1177 aa, Spinacia oleracea
MAEIGYSVCAKLIEVIGSELIKEICDTWGYKSLLEDLNKTVLTVRNVLIQAGVMRELTSEQQGFIADLKDVVYDADDLFDKLLTRAERKQIDGNEISEKVRRFFSSSNKIGQAYYMSRKVKEIKKQLDEIVDRHTKFGFSAEFIPVCRGRGNERETRSYIDVKNILGRDKDKNDIIDRLLNRNGNEACSFLTIVGAGGLGKTALAQLVFNDERVKIEFHDLRYWVCVSDQDGGQFDVKEILCKILEVVTKEKVDNSSTLELVQSQFQEKLRGKKYFLVLDDVWNEDREKWLPLEELLMLGQGGSKVVVTTRSEKTANVIGKRHFYTLECLSPDYSWSLFEMSAFQKGHEQENHHELVDIGKKIVEKCYNNPLAITVVGSLLYGEEISKWRSFEMSELAKIGNGDNKILPILKLSYHNLIPSLKSCFSYCAVFPKDHEIKKEMLIELWMAQGYVVPLDGGQSIEDAAEEHFVILLRRCFFQDVKKDKYGDVDSVKIHDLMHDVAQEVGREELCVVNDNTKNLGDKIRHVHRDVIRYAQRVSLCSHSHKIRSYIGGNCEKRCVDTLIDKWMCLRMLDLSWSDVKNLPNSIGKLLHLRCLNLSYNKDLLILPDAITRLHNLQTLLLKECRSLKELPKDFCKLVKLRHLDLRCSDLKELPKDFCKLVKLRHLDLWGCDDLIGVPLGMDRLISLRVLPFFVVGRKEQSDDDELKALKGLTEIKGSIRIRIYSKYRIVEGMNDTGGAGYLKSMKHLTGVDITFDGGCVNPEAVLATLEPPSNIKRLEMWHYSGTTIPVWGRAEINWAISLSHLVDIQLWHCRNLQEMPVLSKLPHLKSLELYNLISLEYMESTSRSSSSDTEAATPELPTFFPSLEKLRLWRLDKLKGFGNRRSSSFPRLSKLEIWKCPDLTSFPSCPSLEELELKENNEALQIIVKITTTRGKEEKEEDKNAGVGNSQDDDNVKLRKVEIDNVSYLKSLPTNCLTHLDLTIRDSKEGEGEWEVGDAFQKCVSSLRSLTIIGNHGINKVKRLSGRTGLEHFTLLESLKLSDIEDQEDEGEDNIIFWKSFPQNLRSLRIKDSDKMTSLPMGMQYLTSLQTLYLHHCYELNSLPEWISSLSSLQSLHIGKCPALKSLPEAMRNLTSLQRLTIWQCPDLIERCEEPNGEDYPKIQHIPKIVLNEYW

SEQ ID NO: 59 - protein, 1188 aa, Spinacia oleracea
MAEIGYSVCAKLIEVIGSELIKEICDTWGYKSLLEDLNKTVLTVRNVLIQAGVMRELTSEQQGFIADLKDVVYDADDLFDKLLTRAERKQIDGNEISEKVRRFFSSSNKIGQAYYMSRKVKEIKKQLDEIVDRHTKFGFSAEFIPVCRGRGNERETRSYIDVKNILGRDKDKNDIIDRLLNRNGNEACSFLTIVGAGGLGKTALAQLVFNDERVKIEFHDLRYWVCVSDQDGGQFDVKEILCKILEVVTKEKVDNSSTLELVQSQFQEKLRGKKYFLVLDDVWNEDREKWLPLEELLMLGQGGSKVVVTTRSEKTANVIGKRHFYTLECLSPDYSWSLFEMSAFQKGHEQENHHELVDIGKKIVEKCYNNPLAITVVGSLLYGEEISKWRSFEMSELAKIGNGDNKILPILKLSYHNLIPSLKSCFSYCAVFPKDHEIKKEMLIELWMAQGYVVPLDGGQSIEDAAEEHFVILLRRCFFQDVKKDKYGDVDSVKIHDLMHDVAQEVGREELCVVNDNTKNLGDKIRHVHRDVIRYAQRVSLCSHSHKIRSYIGGNCEKRCVDTLIDKWMCLRMLDLSWSDVKNLPNSIGKLLHLRCLNLSYNKDLLILPDAITRLHNLQTLLLKECRSLKELPKDFCKLVKLRHLDLRCSDLKELPKDFCKLVKLRHLDLWGCDDLIGVPLGMDRLISLRVLPFFVVGRKEQSDDDELKALKGLTEIKGSIRIRIYSKYRIVEGMNDTGGAGYLKSMKHLTGVDITFDGGCVNPEAVLATLEPPSNIKRLEMWHYSGTTIPVWGRAEINWAISLSHLVDIQLWHCRNLQEMPVLSKLPHLKSLELYNLISLEYMESTSRSSSSDTEAATPELPTFFPSLEKLRLWRLDKLKGFGNRRSSSFPRLSKLEIWKCPDLTSFPSCPSLEELELKENNEALQIIVKITTTRGKEEKEEDKNAGVGNSQDDDNVKLRKVEIDNVSYLKSLPTNCLTHLDLTIRDSKEGEGEWEVGDAFQKCVSSLRSLTIIGNHGINKVKRLSGRTGLEHFTLLESLKLSDIEDQEDEGEDNIIFWKSFPQNLRSLRIKDSDKMTSLPMGMQYLTSLQTLYLHHCYELNSLPEWISSLSSLQSLHIGKCPALKSLPEAMRNLTSLQRLTIWQCPDLIERCEEPNGEDYPKIQHIPKILLNTSLILNAPNLQDMD

SEQ ID NO: 60 - DNA, 6704 bp, Spinacia oleracea
atggccgaaatcggatactcggtttgtgcgaaactcatcgaagtgattggcagtgagctgatcaaagagatttgcgacacatggggttacaaatctcttcttgaggacctcaacaaaactgtattgacggtcaggaacgttctcattcaggccggggtgatgcgggagcttactagtgaacaacaaggtttcattgcagaccttaaagatgttgtttatgatgctgatgacttgttcgacaagttactcactcgtgctgagcgaaaacagattgatggaaacgaaatctctgaaaaggtacgtcgtttcttttcctctagtaacaagatcggtcaagcttactacatgtctcgtaaggttaaggaaattaagaagcagttggatgaaattgttgataggcatacaaaatttgggtttagtgctgagtttatacctgtttgtaggggaagggggaacgagagggaaacacgttcatatatagatgtcaagaatattcttgggagggataaagataagaatgatatcattgataggttgcttaatcgtaatgataatgaagcttgtagtttcctgaccatagtgggagcgggaggattgggaaaaactgctcttgcccaacttgtgttcaatgatgaaagggtcaaaattgagtttcatgatttgaggtattgggtttgtgtctctgatcaagatgggggccaatttgatgtgaaagaaatcctttgtaagattttagaggtggttactaaggagaaagttgataatagttccgcattggaattggtacaaagccaatttcaagagaagttaagaggaaagaagtacttccttgttcttgatgatgtatggaacgaggatcgtgagaagtggtttaaattggaagagttgttaatgttgggtcaagggggaagcaaggttgtagtgaccgcacgttcagagaagacagcaaatgtcatagggaaaagacatttttatacactggaatgtttgtcgccagattattcatggagcttatttgaaatgtcggcttttcagaaagggcatgagcaggaaaaccatgacgaactagttgatattgggaaaaagattgttgaaaaatgttataacaatccacttgctataacggtggtaggaagtcttctttatggagaggagataagtaagtggcggtcatttgaaatgagtgagttggccaaaattggcaatggggataacaagattttgtcgatattgaagctcagttactacaatcttgcaaactctttgaagagttgttttagttattgtgcagtgtttcccaaggatcatgaaataaagaaggagatgttgattgaactttggatggcacaaggatatgttgtgccgttggatggaggtcaaagtatagaagatgctgccgaggaacattttgtaattttgttacgaaggtgtttctttcaagatgtagtgaaggatgaatacggtgatgttgattctgttaaaatccacgacttgatgcacgatgtcgcccaagaagtgggcagagaggaaatctgtatagtgaatgctaatacaaagaacttgggtgataaaatccgtcatgtacatggtgatgtcaatagatatgcacaaagagtctctctgtgtagccataagattcgttcgtatattggtggtaattgtgaaaaacgttgggtggatacactaatagacaagtggatgtgtcttaggatgttggacttgtcaaggtcggatgttaaaaatttgcctaattcaataggtaaactattgcacttaaggtatcttaacctgtccggtaatagaaagttggagatactccctgatgcgattacaaaactgcataatttgcagacacttcttttagaaggttgcggaagtttaaaggagttgccaaaagatttttgcaaattggtcaaactgagacacttggatttatggggttgtgatgatttgattggtatgccattgggaatggatatgctaactagtcttagagtactgccatactttgtggtgggtaggaagaaacaaagtgttgatgatgagctgaaagccctaaaaggcctcaccgagataaaaggcgacattgatatcaaaatctgttccaattatagaatagttgaaggcatgaatgacacaggaggagctgggtatttgaagagcatgaaacatctcacgggggttgatattacatttgatggtggatgtgttaaccctgaagctgtgttggcaaccctagagccaccttcaaatatcaagagcttatctatagataattacgatggtacaacaattccagtatggggaagagcagagattaattgggcaatctccctctcacatcttgtcgacatttggttttgggattgtagtgatttgcaggagatgccagtgctgagtaaactgcctcatttgaaatcactggaactttttaagttttgtaagttagagtacatggagagtagaagcagcagcagtagcagtgacacagaagcagcaacaccagaattaccaacattcttcccttcccttgaaaaacttacactttggtatctggaaaagttgaagggtttggggaacaggagatcgagtagttttccccgcctctctgaattggaaatctgggaatgcccagatctaacgtggtttcctccttgtccaagccttaaaacgttgaaattggaaaaaaacaatgaagcgttgcaaataatagtaaaaataacaacaacaagaggtaaagaagaaaaagaagaagacaagaatgctggtgttggaaattcacaagatgatgacaatgtcaaattacggaaggtggaaatagacaatctgggttatctcaaatcactgcccacaaattgtctgactcacctcgacattacaataagagattccaaggagggggagggtgaatgggaagttggggaggcatttcagaagtgtgtatcttctttgagaaagctcagcataatcggaaatcacggaataaataaagtgaagagactgtctggaagaacagggttggagcatttcactctgttggactcactcaaattttcagatatagacgaccaggaagatgagggcgaagacaacatcatattctggaaatcctttcctcaaaaccttcgcagtttgagaattgaagactctgacaaaatgacaagtttgcccatggggatgcagtacttaacctccctccaaaccctctatctatcatattgtgatgaattgaattcccttccagaatggataagcagcttatcatctcttcaatccctgttcatatacaattgtccagccctgaaatcactaccagaagcaatgaagaacctcacctcccttcagagacttgagatacatcattgtccagacctagctgaaagatgcagaaaacccaacggggaggactatcccaaaattcaacacatccccggcattgtaagtgattgcagaaagtattttattcatttatatttattttatgcttagaatgatatacgcagtcgtccttaggtttccaatcttgaatttggtttttgttttctttctttgtttctttattcaacaccagcccatttatgattgattcattaaaaaaaggaagaagacaacgaattgagattcctggggtttttttttcgttggggttggttttcatgtatatgttgctgattaaataccagactgatgatgatgatgtgtttatgggttttaaatcagattaaatatatgggaaatgtaagttagttggggatgcacataaggtgtttgatgaaatgtctattagaaatgttgtttcttggacttagaatgatatacactgtcgtcctttggtttccaatcttacatttggtttgtgttttcttagtttgtttctttaatcaacaccagcccattttttttaaactacctgcaactactaattttcatttaccctgtatctcaggaactatggcggtaattctcatttactcaacactaagcttgatcctgaacgcagccaaccttcaggttagaatctgccttactcatccttttgtcatgcattgttttaagttgttttgcttgcttgtgtaatcataattcatagtatacgattcatcattcactatgtctacaggcaagatattggaattgttcacgattccctgaagtttctttgtttttgttgataccaccatattgcagcttatagtgactaagttaatgaatgtttccaaaaaattagtcatataaattcttcttctctctctattacataaactctttttctctttctaacttatcatgttcatgtctaaaacttatacatgctcacatcattgttcgtttcagctgacttacttctgtaagagagctatctagttaacaactcttgtaacattttatttgctagtcagaacatggattggtgcaagcatgggaatttgccaacactctaccaaatcgattggagtttggacttagtttcaccagaagccatacccggacacttactggggactgtcaacaaagccgcattatgatgtacttggatgtttcacgtgcctgaggtgtgagttacttggaagggaagcggtttatttaattgttttcctaagtagattttgcttagaagcttttacttttcacttgaaagggtttttcttgttttaagcttttcgaattagagtttcggttgcattaagagtagtcgtattagtctttttttacctaaggaagacttttttgtaattttcagacgatgcaattcaacttttcgagtgttttgttgcttgtgtgattgtgagtttgtgaatttgtctttcataaatattgagttcatcagaagctttatgctccaccggtagtctagtaccttttgttattgttcagggaagtaatctggtaccttctatatatatgagaaaacatacattatgcaaaattcttacaggttagttacttcctagaacttcagttatactttttttttgttccatgtccttggaatcaagtcattccctctgaaaaatgtgtactgaacttttgaaagttgctgtttgattcctgtttgaatcttcacttttcttgcatcgtgacagctgtgtttacaatgaagtttaagcagacactctctttatatagtgcctccttttggagcatcggagagttgtggctgatcactatgtgctaccaagagattcattaatcgcgtgtttgatcaggtaaaagtttttatgtcaatgtgttttatttttctttctgtttgatcagtttatgtctgtattcagattcttatcttcttctagtagcataacaaatttgtttgtttcatttatataaaccgtttcaggattacaaatgatcggacagagatgtatgcttcagtcgatattgatgataacttaaggtagcattgctagaacagttacagagctgtggctgatcactatgtgctgcaaacagattcatcaatcacgtgtttgataaggtagagttttcatgtcaacgcgtgttttctgtttgatcaatttatgtctgtattcagattcttatctacttctagtagcataacatatctgtttctatcattatataattgtttcagggttacaaatgaccggacagagatgtatgcttcagtcgatattgatgctaacttaagatagcattgctagaacagtttcaggttgccattaatttgaaaacagaaagacaccatcaggtagagttttcatgtcaatgcttttttttttgtttgatcaatttatgtttgtataaaaatttgtatcttcttctatactataaattctatataacgtatctgtttatttcattataataaaccgtttcaggattacaaatgatcgaacagtgatgtatgcttcagtcgataacttcaggtagcattgccagaagaattgcagacacatcctaacttaagagggttatggttgattgactaactctcgaaattctagttaggcaagaggagcattgcagtacctgccttaaaaggggtcgtcttatatagatatctctatcagtagtcatttacgtcttaagtcctgaaataagttgaactaaacatactttgtttgaatcgaagatttagtgaattttactttgtatttgattgtgttgagatgaccgtagggaaaagttaactaattaagcgtaaattatgttcttggattcggcttttatattttcttttcgtttaataaaagtggtcatagagatattctacaatgtattttggtaagttacctaaaatttaatttgattatttttcacataattaatcaactgataaaattttatttggatcaaccgatcaagaagtgaaaacgtaaagaacaaaaagaaacagagggagtatattattatcttttacttttgatagtgaaggatgttatgatattttaactcaatcccttacaaaatatactggttaaatttcttaacaatgtagtactttggcaacaagttcaggttgaaagctttgagaaatagagttaggaaacataagaatcacaaaatttatgcttctctcatctgtgaatcaaaacacaaattcttatttacaaaggttgtacaataattattgtacaccgaagtaaaagttaactcaaaatgcttaaaagttaggcttatatatgtaaaagttatctattgtttagtgataaaaaatttcattttaataaaacttattttttcaa

SEQ ID NO: 61 - DNA, 2000 bp, Spinacia oleracea
  unsure 841..871
tagcattgttcgttctgatttttacggcactgatatccctcatttgcagctctacttctagaaactctttcattctttagttttccttttgattcatgtaacagttgaaccttctttcatgactgatatagaatcaggcagctacttcactacttctatgttgatcttattttgtaataaactttgatagattgaataaaggttgtttgcagtgacttcttaagatgtgattagaagtccataatcactttaaggtagtttttctttacatgattaaggtttttccgaggcctttctattgctttgttggttactgtcatgacatatggtttttctttgcttcttatatcatatggtcctcactcaattttttaatataaagtttctcattggttgactataatacgttatagcaccttataatattttatttaatatacaattttatgtattttacctttttcatattttttcgtgatctaccttctcatatgagctacactaatttggtagctgtttatgcaaatcttgtaccaacggttggctatttgctcaaaattttttttttttttttcgagctagtcattttatgatcattgaagtttgctcttatattatcatttatgtattttaccttttttacatttttttcgtgatctacctgctcatatgagccacactaatttggtagctgcttatacaattcttgtatcaacggttggctacttgttcaaatatttttatttttttacgagtaagtcattttatgatcattgaagttgctctaatattatcatggacctattaacgcatgaataattaactcggtaggaattagttnnnnnnnnnnnnnnnnnnnnnnnnnnnnnnnaaaaaaaaatcagaaaaccaaccttctccagtttactgttgtctaaagccaaagagcatggaattttccagtaatcgcagaccccaaattctcttctccaatcgtccctgtcaatttcagcaattgaatcaatcgttgattttaggatttgccgccaaaaaaatgaaaaatccatgaattttagggttcaaatttgatccgtaattgggaaaattttcagcaattgatcttccaaatcattcatacttgtttccagactgcaaatgaaaggtgcgaactttatactgcattttgattttccattactgtaatttattaagatgaactgcaatttgcaattgttttattcgactactcatctttaaatcaaattgctaaattgctagctaattttcttatcatattgccaaaaatttgttgcttaaatgattccatttctctaattatttttgttttattggtagataaataattaaatatcagccccattaattgaatattcaaaggaaatgtatggtccaaaaatggcgtttaatagtcaatgccgtgttttatggggtggtggagtactatatgactgtgtgtggacttggagaagactagagagtattgattatcaaaatatggaccctgaaaatgaaaatgaaaatgatgtttttacactttaaaatcgtcaagaaacaacaatcctctttagcaatagtatttacacgcgttatttgcacggacttcaatgcaaatagtataaatttacagtcaaagttttcattctaaagcgtaaataactttcatgaatggaggacggtagtataagtataacgttatggcctaccattttcttatcatattcacataaatttgttgctaaaagttgttttacttggctaaaatacttttgttcttattggcagataaacatcagtccattattggccaacttgaacatatacctccaaacaataatcaataatgtcgattatgaagtttgtgaatgcaatttattatcactttcatttataaaatgactacttgattaacacatacaatattacctttctccaaacaccctttcaattctgcttaatcttgttttctcatcatctcttcatctttctgaaaacacaaccca

SEQ ID NO: 62 - DNA, 3453 bp, Spinacia oleracea
atggccgaaatcggatactcggtttgtgcgaaactcatcgaagtgattggcagtgagctgatcaaagagatttgcgacacatggggttacaaatctcttcttgaggacctcaacaaaactgtattgacggtcaggaacgttctcattcaggccggggtgatgcgggagcttactagtgaacaacaaggtttcattgcagaccttaaagatgttgtttatgatgctgatgacttgttcgacaagttactcactcgtgctgagcgaaaacagattgatggaaacgaaatctctgaaaaggtacgtcgtttcttttcctctagtaacaagatcggtcaagcttactacatgtctcgtaaggttaaggaaattaagaagcagttggatgaaattgttgataggcatacaaaatttgggtttagtgctgagtttatacctgtttgtaggggaagggggaacgagagggaaacacgttcatatatagatgtcaagaatattcttgggagggataaagataagaatgatatcattgataggttgcttaatcgtaatgataatgaagcttgtagtttcctgaccatagtgggagcgggaggattgggaaaaactgctcttgcccaacttgtgttcaatgatgaaagggtcaaaattgagtttcatgatttgaggtattgggtttgtgtctctgatcaagatgggggccaatttgatgtgaaagaaatcctttgtaagattttagaggtggttactaaggagaaagttgataatagttccgcattggaattggtacaaagccaatttcaagagaagttaagaggaaagaagtacttccttgttcttgatgatgtatggaacgaggatcgtgagaagtggtttaaattggaagagttgttaatgttgggtcaagggggaagcaaggttgtagtgaccgcacgttcagagaagacagcaaatgtcatagggaaaagacatttttatacactggaatgtttgtcgccagattattcatggagcttatttgaaatgtcggcttttcagaaagggcatgagcaggaaaaccatgacgaactagttgatattgggaaaaagattgttgaaaaatgttataacaatccacttgctataacggtggtaggaagtcttctttatggagaggagataagtaagtggcggtcatttgaaatgagtgagttggccaaaattggcaatggggataacaagattttgtcgatattgaagctcagttactacaatcttgcaaactctttgaagagttgttttagttattgtgcagtgtttcccaaggatcatgaaataaagaaggagatgttgattgaactttggatggcacaaggatatgttgtgccgttggatggaggtcaaagtatagaagatgctgccgaggaacattttgtaattttgttacgaaggtgtttctttcaagatgtagtgaaggatgaatacggtgatgttgattctgttaaaatccacgacttgatgcacgatgtcgcccaagaagtgggcagagaggaaatctgtatagtgaatgctaatacaaagaacttgggtgataaaatccgtcatgtacatggtgatgtcaatagatatgcacaaagagtctctctgtgtagccataagattcgttcgtatattggtggtaattgtgaaaaacgttgggtggatacactaatagacaagtggatgtgtcttaggatgttggacttgtcaaggtcggatgttaaaaatttgcctaattcaataggtaaactattgcacttaaggtatcttaacctgtccggtaatagaaagttggagatactccctgatgcgattacaaaactgcataatttgcagacacttcttttagaaggttgcggaagtttaaaggagttgccaaaagatttttgcaaattggtcaaactgagacacttggatttatggggttgtgatgatttgattggtatgccattgggaatggatatgctaactagtcttagagtactgccatactttgtggtgggtaggaagaaacaaagtgttgatgatgagctgaaagccctaaaaggcctcaccgagataaaaggcgacattgatatcaaaatctgttccaattatagaatagttgaaggcatgaatgacacaggaggagctgggtatttgaagagcatgaaacatctcacgggggttgatattacatttgatggtggatgtgttaaccctgaagctgtgttggcaaccctagagccaccttcaaatatcaagagcttatctatagataattacgatggtacaacaattccagtatggggaagagcagagattaattgggcaatctccctctcacatcttgtcgacatttggttttgggattgtagtgatttgcaggagatgccagtgctgagtaaactgcctcatttgaaatcactggaactttttaagttttgtaagttagagtacatggagagtagaagcagcagcagtagcagtgacacagaagcagcaacaccagaattaccaacattcttcccttcccttgaaaaacttacactttggtatctggaaaagttgaagggtttggggaacaggagatcgagtagttttccccgcctctctgaattggaaatctgggaatgcccagatctaacgtggtttcctccttgtccaagccttaaaacgttgaaattggaaaaaaacaatgaagcgttgcaaataatagtaaaaataacaacaacaagaggtaaagaagaaaaagaagaagacaagaatgctggtgttggaaattcacaagatgatgacaatgtcaaattacggaaggtggaaatagacaatctgggttatctcaaatcactgcccacaaattgtctgactcacctcgacattacaataagagattccaaggagggggagggtgaatgggaagttggggaggcatttcagaagtgtgtatcttctttgagaaagctcagcataatcggaaatcacggaataaataaagtgaagagactgtctggaagaacagggttggagcatttcactctgttggactcactcaaattttcagatatagacgaccaggaagatgagggcgaagacaacatcatattctggaaatcctttcctcaaaaccttcgcagtttgagaattgaagactctgacaaaatgacaagtttgcccatggggatgcagtacttaacctccctccaaaccctctatctatcatattgtgatgaattgaattcccttccagaatggataagcagcttatcatctcttcaatccctgttcatatacaattgtccagccctgaaatcactaccagaagcaatgaagaacctcacctcccttcagagacttgagatacatcattgtccagacctagctgaaagatgcagaaaacccaacggggaggactatcccaaaattcaacacatccccggcattgaactatggcggtaa

SEQ ID NO: 63 - protein, 1150 aa, Spinacia oleracea
MAEIGYSVCAKLIEVIGSELIKEICDTWGYKSLLEDLNKTVLTVRNVLIQAGVMRELTSEQQGFIADLKDVVYDADDLFDKLLTRAERKQIDGNEISEKVRRFFSSSNKIGQAYYMSRKVKEIKKQLDEIVDRHTKFGFSAEFIPVCRGRGNERETRSYIDVKNILGRDKDKNDIIDRLLNRNDNEACSFLTIVGAGGLGKTALAQLVFNDERVKIEFHDLRYWVCVSDQDGGQFDVKEILCKILEVVTKEKVDNSSALELVQSQFQEKLRGKKYFLVLDDVWNEDREKWFKLEELLMLGQGGSKVVVTARSEKTANVIGKRHFYTLECLSPDYSWSLFEMSAFQKGHEQENHDELVDIGKKIVEKCYNNPLAITVVGSLLYGEEISKWRSFEMSELAKIGNGDNKILSILKLSYYNLANSLKSCFSYCAVFPKDHEIKKEMLIELWMAQGYVVPLDGGQSIEDAAEEHFVILLRRCFFQDVVKDEYGDVDSVKIHDLMHDVAQEVGREEICIVNANTKNLGDKIRHVHGDVNRYAQRVSLCSHKIRSYIGGNCEKRWVDTLIDKWMCLRMLDLSRSDVKNLPNSIGKLLHLRYLNLSGNRKLEILPDAITKLHNLQTLLLEGCGSLKELPKDFCKLVKLRHLDLWGCDDLIGMPLGMDMLTSLRVLPYFVVGRKKQSVDDELKALKGLTEIKGDIDIKICSNYRIVEGMNDTGGAGYLKSMKHLTGVDITFDGGCVNPEAVLATLEPPSNIKSLSIDNYDGTTIPVWGRAEINWAISLSHLVDIWFWDCSDLQEMPVLSKLPHLKSLELFKFCKLEYMESRSSSSSSDTEAATPELPTFFPSLEKLTLWYLEKLKGLGNRRSSSFPRLSELEIWECPDLTWFPPCPSLKTLKLEKNNEALQIIVKITTTRGKEEKEEDKNAGVGNSQDDDNVKLRKVEIDNLGYLKSLPTNCLTHLDITIRDSKEGEGEWEVGEAFQKCVSSLRKLSIIGNHGINKVKRLSGRTGLEHFTLLDSLKFSDIDDQEDEGEDNIIFWKSFPQNLRSLRIEDSDKMTSLPMGMQYLTSLQTLYLSYCDELNSLPEWISSLSSLQSLFIYNCPALKSLPEAMKNLTSLQRLEIHHCPDLAERCRKPNGEDYPKIQHIPGIELWR

SEQ ID NO: 64 - DNA, 8389 bp, Spinacia oleracea
  unsure 5171..5230
  unsure 5553..5602
atggccgaaatcggatactcggtttgtgcgaaactcatcgaagtgattggcagtgagctgatcaaagagatttgtgacacatggggttacaaatctcttcttgaggacctcaacaaaactgtattgacggtcaggaacgttctcattcaagccggggtgatgcgggagcttactagtgaacaacaaggtttcattgcagaccttaaagatgttgtttatgatgctgatgacttgttcgacaagttactcactcgtgctgagcgaaaacagattgatggaaacgaaatctctgaaaaggtacgtcgtttcttttcctctagtaacaagatcggtcaagcttactacatgtctcgtaaggttaaggaaattaagaagcagttggatgaaattgttgataggcatacaaaatttgggtttagtgccgagtttatacctgtttgtagggaaagggggaacgagagggaaacacgttcatatatagatgtcaagaatattcttgggagggataaagataagaatgatatcatagataggttgcttaatcgtaatggtaatgaagcttgtagtttcctgaccatagtgggagcgggaggattgggaaaaactgctcttgcacaacttgtgttcaatgatgaaagggtcaaaattgagttccatgatttgaggtattgggtttgtgtctctgatcaagatgggggccaatttgatgtgaaagaaatcctttgtaagattttagaggtggttactaaggagaaagttgataatagttccacattggaattggtacaaagccaatttcaagagaagttaagaggaaagaagtacttccttgttcttgatgatgtatggaacgaagatcgtgagaagtggcttcctttggaagagttgttaatgttgggtcaagggggaagcaaggttgtagtgaccgcacgttcagagaagacagcaaatgtcatagggaaaagacatttttatacactggaatgtttgtcaccagattattcatggagcttatttgaaatgtcggcttttcagaaagggcatgagcaggaaaaccatcacgaactagttgatattgggaaaaagattgttgaaaaatgttataacaatccacttgctataacggtggtaggaagtcttctttatggagaggagataagtaagtggcggtcatttgaaatgagtgagttggccaaaattggcaatggggataataagattttgccgatattaaagctcagttaccataatcttataccctcgttgaagagttgcttcagttattgtgcagtgtttcccaaggatcatgaaataaagaaggagatgttgattgatctttggatagcacaaggatacgttgtggcacttgatggaggtcaaagtatagaagatgctgccgaagaacattttgtaattttgttacggagatgtttctttcaagatgtaaagaaggatgaatatggtgatgttgattctgttaaaatccacgacttgatgcacgatgtcgcccaagaagtggggagggaggaaatatgtgtagtgaatgataatacaaagaacttgggtgataaaatccgtcatgtacatggtgatgtcaatagatatgcacaaagagtctctctgtgtagccatagccataagattcgttcgtatattggtggtgattgtgaaaaacgttgtgtggatacactaatagacaagtggatgtgtcttaggatgttggacttgtcatggtcggatgttaaaaatttgcctaattcaataggtaaattgttgcacttgaggtatcttaacctgtcagataatagaaatctaaagatacttcctgatgcaattacaagactgcataatttgcagacactgcttttaaaagattgcagaagtttaaaggagttgccaaaagatttttgcaaattggtcaaactgagacacttggatttatggggttgtgatgatttgattggtatgccatttggaatggataagctaactagtcttagaatactaccaaacattgtggtgggtaggaaggaacaaagtgttgatgatgagctgaaagcccttaaaggcctcaccgagataaaaggcgacattgatatcaaaatctgtgaaaattatagaatagttgaaggcatgaatgacacaggaggagctgggtatttgaagagcatgaaacatctcagggagattggtattacatttgatggtggatgtgttaaccctgaagctgtgttggcaaccctagagccaccttcaaatatcaagagcttatctatacatcgttttgatggtaaaacacttccagtatggggaagagcagagattaattgggcaatctccctctcacatcttgtcgacatccagctttggcattgtcgtaatttgcaggagatgccagtgctgagtaaactgcctcatttgaaatcactggaactttataatttgattagtttagagtacatggagagcacaagcagaagcagtagcagtgacacagaagcagcaacaccagaattaccaacattcttcccttcccttgaaaaacttacactttggggtctggaaaagttgaagggtttggggaacaggagatcgagtagttttccccgcctctctgaattgaaaatcatggaatgcccagatctaacgtggtttcctccctgtccaagccttgaaaaacttacactttggcgtctggacaagttgaagggttttgggaaccggagatcgagtacttttccccgcctctctgaattggaaatcaagaaatgcccagatctaacgtcatttccttcttgtccaagccttgagaagttggaattgaaagaaagcaatgaagcattgcaaataatagtaaaaataacaacaagaggtaaagaaaaagaagagaacaataatgctggtgttagaaattcacaagatgatgacaaagtcaaattacggaagatggtgatagacaatctgggttatctcaaatcactgcccacaaattgtcttactcacctcgaccttacaataagtgattccaaggagggggagggtgaatgggaagttggggatgcatttcagaagtgtgtatcttctttgagaagcctcaccataatcggaaatcacggaataaataaagtgaagagactgtctggaagaacagggttggagcatttcactctgttggaatcactcaaactttcagatatagaagaccaggaagatgagggcgaagacaacatcatattctggaaatcctttcctcaaaacctccgcagtttgagaattaaagactctgacaaaatgacaagtttgcccatggggatgcagtacttaacctccctccaaaccctctatctacaccattgttatgaattgaattcccttccagaatggataagcagcttatcatctcttcaatacctgcgcatatactactgtccagccctgaaatcactaccagaagcaatgcggaacctcacctcccttcagacacttgggatatcggattgtccagacctagttaaaagatgcagaaaacccaacggcaaggactatcccaaaattcaacacatcccctattggagtatagaacatcaggttataactagcttgtaactaacttgtaactacctagtataaatacagtagtttgtactattttacattcaattacacaattaataaaatgtagactctcactctctctctctaagccacgagctccaagctcgtcaatggcttcccttctctgttcttgctttcttctttcctcttcaattcacaaattcaacatggtatcagagcgggacgatccttgctcttcacttccgcacaaaattttcgttcaattcaacccatcaaattttttttttcccccaaattttctcgaattcggtcaaaattcgacgaattagggattcaatttaccctgatttcttctgattccattcaatgattgttcatttcgaatcttgaatcaaataattgttgattctggattccccaaattctagggttcttgaaggatttacaagaatctggcattgctgatagattcttgaagcaatttgcgtctccgtgttcctcggtggtcttgagtttgtttccgtattcgctgctctcatctttactggggattgtggtctgatttcttggcttcctctgtcgatgatgtgattggtaatacttaaaacccctctctctctttccgaaattattgatgctggttcgtcatttttttttttggaatcatctcagtttatcgccgcaatttgagttgttgttgggtaattgttgttgctgccgatgatgttttgtgaatttgagaattgttagaatgattcttgttcaatcaatttggttctcatactctaatggaagcctgttttggagcgacgaattatgcaattctgagatttcttttgatccttatttcttttcttcacttgaatttctggtgtttgtgagtaattcttggttaatgtttgatctgggtagttcttgggtttactgaagacgtttcttgaaggttttgacagaaaagctgaggtttaattccaaaattcttctgtccaattacatttttattgttgatggttcttatgtgagaactagactgagttttttttatgaaattgtttcgaccttcagatggattcgagagatttgagttcattttctttgatgaatgtgttagaaaaggttttggtgcagtgaccattttaaaccaaatagagttacataaatattgggattcttttctgggaatgtagttaggagttgaaatcttttggagctgctttaccataaaacccagcctcagagtctgttaaccagttaggaccgtgtaaacatgatcccaggctgcatttgcgttatcagatttgattcagttttggaattgtggattttgagggtttaaaagcttacagttgctcctggagaatggtgtgagcaatataggaattcagcactagtattgcagaaaatgaagcttggttgttgattgttggcatgttttgttgccattgttttgggttgatgttttccttttcttttgaatgttggcacgattcaacatttctttcctgcaacagatttggagttcagtacctgtataatcaggtcaattttgttcatttttcccagcaacagatctggagaatcagaacctgtaaaannnnnnnnnnnnnnnnnnnnnnnnnnnnnnnnnnnnnnnnnnnnnnnnnnnnnnnnnnnnacccaaagaggtcagttttcattgatccattgtgatcattcttttgatgagacccattgaggctcatttcttcaaggcaatattggaagttgtagattgatatgagcagttggtacaacagcaacaaaagtggccagcatctatgcttgttcatgaggagttcttggtgcagagttaatgaagagtctgttttgaagctttcaaactgaagatgtttatcaccatctccagtttgagggggggtattggagtatagaacatcaggttataactagcttgtaactaacttgtaactacctagtataaatacagtagtttgtacnnnnnnnnnnnnnnnnnnnnnnnnnnnnnnnnnnnnnnnnnnnnnnnnnnccacgagctccaagctcgtcaatggcttcccttctctgttcttgctttcttctttcctcttcaattcacaaattcaacatccccaaaattgtaagtcattgcagaaagtaatttattcatttatatttattttatgcttagaatgatatacgcagtcgtcctttggtttcaaatcttgaatttggtttttgttttctttctttgtttctttattcaacaccagcccatttatgattgattcattaaaaaaaggatggagttttatggatttgaagaagacaacgaattgagattcctggggttttctttttgttggggttggatttcatgtatatgttgctgattaaatacgagactgatgatgatgatgtgtttatgggttttaaatcagattaaatatatgggaaatgcaagttaatttgggatgcacataaggtgtttgctgaaatgtctatgagaaatgttgtttcttggacttagaatgatatacactgtcgtcctttggtttccaatcttacatttggtttgtgttttcttagtttgtttctttaatcaacaccaacccgttttttttaaactacctgcaactactaatttacgtttaccctgtatctcaggtactaaatgaatattggtgattttcagttactcaacactagcttgatcctgaacgcacccaaccttcaggttagaatccggcttactcatccttttgtccagttttcaagtaattgttttggcaggatcaattctctaattgttgtacaccgtatattgcaatttatagtgactacagttaatgaatgtttacaaaaaattagtcatgtaaaaacttcttctctgtccattacataaactctttttctctttctaacttatcatgttcatgtctaaacaattaaacatgctcacatcaatgttcatttaagctaacttacttctgtaagagagcgagctagttaaaaactcctttaactttctgttttatactcaggacatggattgatgcaagcatgaagaacttcgggaatttgctaaaactctaccaaagcgatgagagtttggactttatttcacttgaagtcagggactgtcaacaaagccacagtgtgcatgttggctgtttcacttggacgataaaaaggtttatttaattgttttcctaagtgtatttggcttacaagcttttacttttcacttgaaagggtttttcttgttttaagcttttcgaattagagttttcggttgaagtaagagtagtcgtattagtcttttacctaaggaagactcttttttgtaattttcagactatgcaattcaagttttcgagtgttttcttgcttgtgtgattgtgagttggtgaattcgtctttcatacattttgagattatcagaagctttatgctccaccggtagtctagtaccttttctgttactgtgcagggaagtaatctggtaccttctatatatatggaaaaacatacattatacattatgcaaaattcttacaggttagttacttcctggaacttcatttacacttagttttttttgttccattccctcggaatcaagtcattccctctgagaaatatgtaatgaacttctgtatgttgctgtttggttcctgttttaatcttcaattttcttgtatagttacagctgcatttacaatgaagtttaagcagacactctctttatatagtgcctctttctggagcaccgtagagctgtctgtggttgatcaccatctgctgccgagagattcagcaatcgcgtgtttgatcaggtaaaagtttttatgtcaatgtgtttttttttccgtttgatcaatttatgtctgtattcagattcttatcttcttacagtagcataacacattgtttctttcatttatgtaaactgtttcaagattacagagatgtatgcttcagtcgacattgatgataacttaagatggcattcctacaacagttgcaggcgcattctaactccggcaattctagttaggcaagaggagcattgccaatacctgccacctctgggatttactataccagggttgaagtttatggaagacaccagctatgcacaagccttcaaggggtcatcctacataacaagttgaaccaaccaattgcttgttggttcagtggtaattgaagctgaatttggtagggatggcccgtgttcgatccccacaacaacaattgggaggggactggaacctatccacacagaactcgccctgaatccggattagccctaagggtgaacggggtgctaacaccaaaaaaaaaaacataacaagttgaaccaaacatactttgtttgaattgaagatttagtgatttcatttgatcgattgagatgtcttattataagcgtatatgctcttggatttggccacttaggtgttgtttgacaattggacattaactcgcttttatattttcttttctcttaggaaaggtgatcctgagaatttatattggaacactttttttttctcactagctttaaaaaagtgttctgtgttacctgcaattcaatttgattatttttcacatagttttacctgaaaaagtgttacctgaaaaagtgttacctgaaaatcaactgacataagtttttgtttggatccaattaaggacactagataaatcggaataaataatcaaccaattaagtacttcataattaaatatgaagtgtattattatcttatgcttgtgacattgaaggatgttatgatattttaactcaataccttgcaaaatatactgg

SEQ ID NO: 65 - DNA, 2000 bp, Spinacia oleracea; identical to SEQ ID NO: 13

SEQ ID NO: 66 - DNA, 3606 bp, Spinacia oleracea
atggccgaaatcggatactcggtttgtgcgaaactcatcgaagtgattggcagtgagctgatcaaagagatttgtgacacatggggttacaaatctcttcttgaggacctcaacaaaactgtattgacggtcaggaacgttctcattcaagccggggtgatgcgggagcttactagtgaacaacaaggtttcattgcagaccttaaagatgttgtttatgatgctgatgacttgttcgacaagttactcactcgtgctgagcgaaaacagattgatggaaacgaaatctctgaaaaggtacgtcgtttcttttcctctagtaacaagatcggtcaagcttactacatgtctcgtaaggttaaggaaattaagaagcagttggatgaaattgttgataggcatacaaaatttgggtttagtgccgagtttatacctgtttgtagggaaagggggaacgagagggaaacacgttcatatatagatgtcaagaatattcttgggagggataaagataagaatgatatcatagataggttgcttaatcgtaatggtaatgaagcttgtagtttcctgaccatagtgggagcgggaggattgggaaaaactgctcttgcacaacttgtgttcaatgatgaaagggtcaaaattgagttccatgatttgaggtattgggtttgtgtctctgatcaagatgggggccaatttgatgtgaaagaaatcctttgtaagattttagaggtggttactaaggagaaagttgataatagttccacattggaattggtacaaagccaatttcaagagaagttaagaggaaagaagtacttccttgttcttgatgatgtatggaacgaagatcgtgagaagtggcttcctttggaagagttgttaatgttgggtcaagggggaagcaaggttgtagtgaccgcacgttcagagaagacagcaaatgtcatagggaaaagacatttttatacactggaatgtttgtcaccagattattcatggagcttatttgaaatgtcggcttttcagaaagggcatgagcaggaaaaccatcacgaactagttgatattgggaaaaagattgttgaaaaatgttataacaatccacttgctataacggtggtaggaagtcttctttatggagaggagataagtaagtggcggtcatttgaaatgagtgagttggccaaaattggcaatggggataataagattttgccgatattaaagctcagttaccataatcttataccctcgttgaagagttgcttcagttattgtgcagtgtttcccaaggatcatgaaataaagaaggagatgttgattgatctttggatagcacaaggatacgttgtggcacttgatggaggtcaaagtatagaagatgctgccgaagaacattttgtaattttgttacggagatgtttctttcaagatgtaaagaaggatgaatatggtgatgttgattctgttaaaatccacgacttgatgcacgatgtcgcccaagaagtggggagggaggaaatatgtgtagtgaatgataatacaaagaacttgggtgataaaatccgtcatgtacatggtgatgtcaatagatatgcacaaagagtctctctgtgtagccatagccataagattcgttcgtatattggtggtgattgtgaaaaacgttgtgtggatacactaatagacaagtggatgtgtcttaggatgttggacttgtcatggtcggatgttaaaaatttgcctaattcaataggtaaattgttgcacttgaggtatcttaacctgtcagataatagaaatctaaagatacttcctgatgcaattacaagactgcataatttgcagacactgcttttaaaagattgcagaagtttaaaggagttgccaaaagatttttgcaaattggtcaaactgagacacttggatttatggggttgtgatgatttgattggtatgccatttggaatggataagctaactagtcttagaatactaccaaacattgtggtgggtaggaaggaacaaagtgttgatgatgagctgaaagcccttaaaggcctcaccgagataaaaggcgacattgatatcaaaatctgtgaaaattatagaatagttgaaggcatgaatgacacaggaggagctgggtatttgaagagcatgaaacatctcagggagattggtattacatttgatggtggatgtgttaaccctgaagctgtgttggcaaccctagagccaccttcaaatatcaagagcttatctatacatcgttttgatggtaaaacacttccagtatggggaagagcagagattaattgggcaatctccctctcacatcttgtcgacatccagctttggcattgtcgtaatttgcaggagatgccagtgctgagtaaactgcctcatttgaaatcactggaactttataatttgattagtttagagtacatggagagcacaagcagaagcagtagcagtgacacagaagcagcaacaccagaattaccaacattcttcccttcccttgaaaaacttacactttggggtctggaaaagttgaagggtttggggaacaggagatcgagtagttttccccgcctctctgaattgaaaatcatggaatgcccagatctaacgtggtttcctccctgtccaagccttgaaaaacttacactttggcgtctggacaagttgaagggttttgggaaccggagatcgagtacttttccccgcctctctgaattggaaatcaagaaatgcccagatctaacgtcatttccttcttgtccaagccttgagaagttggaattgaaagaaagcaatgaagcattgcaaataatagtaaaaataacaacaagaggtaaagaaaaagaagagaacaataatgctggtgttagaaattcacaagatgatgacaaagtcaaattacggaagatggtgatagacaatctgggttatctcaaatcactgcccacaaattgtcttactcacctcgaccttacaataagtgattccaaggagggggagggtgaatgggaagttggggatgcatttcagaagtgtgtatcttctttgagaagcctcaccataatcggaaatcacggaataaataaagtgaagagactgtctggaagaacagggttggagcatttcactctgttggaatcactcaaactttcagatatagaagaccaggaagatgagggcgaagacaacatcatattctggaaatcctttcctcaaaacctccgcagtttgagaattaaagactctgacaaaatgacaagtttgcccatggggatgcagtacttaacctccctccaaaccctctatctacaccattgttatgaattgaattcccttccagaatggataagcagcttatcatctcttcaatacctgcgcatatactactgtccagccctgaaatcactaccagaagcaatgcggaacctcacctcccttcagacacttgggatatcggattgtccagacctagttaaaagatgcagaaaacccaacggcaaggactatcccaaaattcaacacatcccctattggagtatagaacatcaggttataactagcttgtaa

SEQ ID NO: 67 - DNA, 3609 bp, Spinacia oleracea
atggccgaaatcggatactcggtttgtgcgaaactcatcgaagtgattggcagtgagctgatcaaagagatttgtgacacatggggttacaaatctcttcttgaggacctcaacaaaactgtattgacggtcaggaacgttctcattcaagccggggtgatgcgggagcttactagtgaacaacaaggtttcattgcagaccttaaagatgttgtttatgatgctgatgacttgttcgacaagttactcactcgtgctgagcgaaaacagattgatggaaacgaaatctctgaaaaggtacgtcgtttcttttcctctagtaacaagatcggtcaagcttactacatgtctcgtaaggttaaggaaattaagaagcagttggatgaaattgttgataggcatacaaaatttgggtttagtgccgagtttatacctgtttgtagggaaagggggaacgagagggaaacacgttcatatatagatgtcaagaatattcttgggagggataaagataagaatgatatcatagataggttgcttaatcgtaatggtaatgaagcttgtagtttcctgaccatagtgggagcgggaggattgggaaaaactgctcttgcacaacttgtgttcaatgatgaaagggtcaaaattgagttccatgatttgaggtattgggtttgtgtctctgatcaagatgggggccaatttgatgtgaaagaaatcctttgtaagattttagaggtggttactaaggagaaagttgataatagttccacattggaattggtacaaagccaatttcaagagaagttaagaggaaagaagtacttccttgttcttgatgatgtatggaacgaagatcgtgagaagtggcttcctttggaagagttgttaatgttgggtcaagggggaagcaaggttgtagtgaccgcacgttcagagaagacagcaaatgtcatagggaaaagacatttttatacactggaatgtttgtcaccagattattcatggagcttatttgaaatgtcggcttttcagaaagggcatgagcaggaaaaccatcacgaactagttgatattgggaaaaagattgttgaaaaatgttataacaatccacttgctataacggtggtaggaagtcttctttatggagaggagataagtaagtggcggtcatttgaaatgagtgagttggccaaaattggcaatggggataataagattttgccgatattaaagctcagttaccataatcttataccctcgttgaagagttgcttcagttattgtgcagtgtttcccaaggatcatgaaataaagaaggagatgttgattgatctttggatagcacaaggatacgttgtggcacttgatggaggtcaaagtatagaagatgctgccgaagaacattttgtaattttgttacggagatgtttctttcaagatgtaaagaaggatgaatatggtgatgttgattctgttaaaatccacgacttgatgcacgatgtcgcccaagaagtggggagggaggaaatatgtgtagtgaatgataatacaaagaacttgggtgataaaatccgtcatgtacatggtgatgtcaatagatatgcacaaagagtctctctgtgtagccatagccataagattcgttcgtatattggtggtgattgtgaaaaacgttgtgtggatacactaatagacaagtggatgtgtcttaggatgttggacttgtcatggtcggatgttaaaaatttgcctaattcaataggtaaattgttgcacttgaggtatcttaacctgtcagataatagaaatctaaagatacttcctgatgcaattacaagactgcataatttgcagacactgcttttaaaagattgcagaagtttaaaggagttgccaaaagatttttgcaaattggtcaaactgagacacttggatttatggggttgtgatgatttgattggtatgccatttggaatggataagctaactagtcttagaatactaccaaacattgtggtgggtaggaaggaacaaagtgttgatgatgagctgaaagcccttaaaggcctcaccgagataaaaggcgacattgatatcaaaatctgtgaaaattatagaatagttgaaggcatgaatgacacaggaggagctgggtatttgaagagcatgaaacatctcagggagattggtattacatttgatggtggatgtgttaaccctgaagctgtgttggcaaccctagagccaccttcaaatatcaagagcttatctatacatcgttttgatggtaaaacacttccagtatggggaagagcagagattaattgggcaatctccctctcacatcttgtcgacatccagctttggcattgtcgtaatttgcaggagatgccagtgctgagtaaactgcctcatttgaaatcactggaactttataatttgattagtttagagtacatggagagcacaagcagaagcagtagcagtgacacagaagcagcaacaccagaattaccaacattcttcccttcccttgaaaaacttacactttggggtctggaaaagttgaagggtttggggaacaggagatcgagtagttttccccgcctctctgaattgaaaatcatggaatgcccagatctaacgtggtttcctccctgtccaagccttgaaaaacttacactttggcgtctggacaagttgaagggttttgggaaccggagatcgagtacttttccccgcctctctgaattggaaatcaagaaatgcccagatctaacgtcatttccttcttgtccaagccttgagaagttggaattgaaagaaagcaatgaagcattgcaaataatagtaaaaataacaacaagaggtaaagaaaaagaagagaacaataatgctggtgttagaaattcacaagatgatgacaaagtcaaattacggaagatggtgatagacaatctgggttatctcaaatcactgcccacaaattgtcttactcacctcgaccttacaataagtgattccaaggagggggagggtgaatgggaagttggggatgcatttcagaagtgtgtatcttctttgagaagcctcaccataatcggaaatcacggaataaataaagtgaagagactgtctggaagaacagggttggagcatttcactctgttggaatcactcaaactttcagatatagaagaccaggaagatgagggcgaagacaacatcatattctggaaatcctttcctcaaaacctccgcagtttgagaattaaagactctgacaaaatgacaagtttgcccatggggatgcagtacttaacctccctccaaaccctctatctacaccattgttatgaattgaattcccttccagaatggataagcagcttatcatctcttcaatacctgcgcatatactactgtccagccctgaaatcactaccagaagcaatgcggaacctcacctcccttcagacacttgggatatcggattgtccagacctagttaaaagatgcagaaaacccaacggcaaggactatcccaaaattcaacacatcccctattggagtatagaacatcaggtactaaatgaatattggtga

SEQ ID NO: 68 - DNA, 3642 bp, Spinacia oleracea
atggccgaaatcggatactcggtttgtgcgaaactcatcgaagtgattggcagtgagctgatcaaagagatttgtgacacatggggttacaaatctcttcttgaggacctcaacaaaactgtattgacggtcaggaacgttctcattcaagccggggtgatgcgggagcttactagtgaacaacaaggtttcattgcagaccttaaagatgttgtttatgatgctgatgacttgttcgacaagttactcactcgtgctgagcgaaaacagattgatggaaacgaaatctctgaaaaggtacgtcgtttcttttcctctagtaacaagatcggtcaagcttactacatgtctcgtaaggttaaggaaattaagaagcagttggatgaaattgttgataggcatacaaaatttgggtttagtgccgagtttatacctgtttgtagggaaagggggaacgagagggaaacacgttcatatatagatgtcaagaatattcttgggagggataaagataagaatgatatcatagataggttgcttaatcgtaatggtaatgaagcttgtagtttcctgaccatagtgggagcgggaggattgggaaaaactgctcttgcacaacttgtgttcaatgatgaaagggtcaaaattgagttccatgatttgaggtattgggtttgtgtctctgatcaagatgggggccaatttgatgtgaaagaaatcctttgtaagattttagaggtggttactaaggagaaagttgataatagttccacattggaattggtacaaagccaatttcaagagaagttaagaggaaagaagtacttccttgttcttgatgatgtatggaacgaagatcgtgagaagtggcttcctttggaagagttgttaatgttgggtcaagggggaagcaaggttgtagtgaccgcacgttcagagaagacagcaaatgtcatagggaaaagacatttttatacactggaatgtttgtcaccagattattcatggagcttatttgaaatgtcggcttttcagaaagggcatgagcaggaaaaccatcacgaactagttgatattgggaaaaagattgttgaaaaatgttataacaatccacttgctataacggtggtaggaagtcttctttatggagaggagataagtaagtggcggtcatttgaaatgagtgagttggccaaaattggcaatggggataataagattttgccgatattaaagctcagttaccataatcttataccctcgttgaagagttgcttcagttattgtgcagtgtttcccaaggatcatgaaataaagaaggagatgttgattgatctttggatagcacaaggatacgttgtggcacttgatggaggtcaaagtatagaagatgctgccgaagaacattttgtaattttgttacggagatgtttctttcaagatgtaaagaaggatgaatatggtgatgttgattctgttaaaatccacgacttgatgcacgatgtcgcccaagaagtggggagggaggaaatatgtgtagtgaatgataatacaaagaacttgggtgataaaatccgtcatgtacatggtgatgtcaatagatatgcacaaagagtctctctgtgtagccatagccataagattcgttcgtatattggtggtgattgtgaaaaacgttgtgtggatacactaatagacaagtggatgtgtcttaggatgttggacttgtcatggtcggatgttaaaaatttgcctaattcaataggtaaattgttgcacttgaggtatcttaacctgtcagataatagaaatctaaagatacttcctgatgcaattacaagactgcataatttgcagacactgcttttaaaagattgcagaagtttaaaggagttgccaaaagatttttgcaaattggtcaaactgagacacttggatttatggggttgtgatgatttgattggtatgccatttggaatggataagctaactagtcttagaatactaccaaacattgtggtgggtaggaaggaacaaagtgttgatgatgagctgaaagcccttaaaggcctcaccgagataaaaggcgacattgatatcaaaatctgtgaaaattatagaatagttgaaggcatgaatgacacaggaggagctgggtatttgaagagcatgaaacatctcagggagattggtattacatttgatggtggatgtgttaaccctgaagctgtgttggcaaccctagagccaccttcaaatatcaagagcttatctatacatcgttttgatggtaaaacacttccagtatggggaagagcagagattaattgggcaatctccctctcacatcttgtcgacatccagctttggcattgtcgtaatttgcaggagatgccagtgctgagtaaactgcctcatttgaaatcactggaactttataatttgattagtttagagtacatggagagcacaagcagaagcagtagcagtgacacagaagcagcaacaccagaattaccaacattcttcccttcccttgaaaaacttacactttggggtctggaaaagttgaagggtttggggaacaggagatcgagtagttttccccgcctctctgaattgaaaatcatggaatgcccagatctaacgtggtttcctccctgtccaagccttgaaaaacttacactttggcgtctggacaagttgaagggttttgggaaccggagatcgagtacttttccccgcctctctgaattggaaatcaagaaatgcccagatctaacgtcatttccttcttgtccaagccttgagaagttggaattgaaagaaagcaatgaagcattgcaaataatagtaaaaataacaacaagaggtaaagaaaaagaagagaacaataatgctggtgttagaaattcacaagatgatgacaaagtcaaattacggaagatggtgatagacaatctgggttatctcaaatcactgcccacaaattgtcttactcacctcgaccttacaataagtgattccaaggagggggagggtgaatgggaagttggggatgcatttcagaagtgtgtatcttctttgagaagcctcaccataatcggaaatcacggaataaataaagtgaagagactgtctggaagaacagggttggagcatttcactctgttggaatcactcaaactttcagatatagaagaccaggaagatgagggcgaagacaacatcatattctggaaatcctttcctcaaaacctccgcagtttgagaattaaagactctgacaaaatgacaagtttgcccatggggatgcagtacttaacctccctccaaaccctctatctacaccattgttatgaattgaattcccttccagaatggataagcagcttatcatctcttcaatacctgcgcatatactactgtccagccctgaaatcactaccagaagcaatgcggaacctcacctcccttcagacacttgggatatcggattgtccagacctagttaaaagatgcagaaaacccaacggcaaggactatcccaaaattcaacacatcccctattggagtatagaacatcagttactcaacactagcttgatcctgaacgcacccaaccttcaggacatggattga

SEQ ID NO: 69 - protein, 1201 aa, Spinacia oleracea
MAEIGYSVCAKLIEVIGSELIKEICDTWGYKSLLEDLNKTVLTVRNVLIQAGVMRELTSEQQGFIADLKDVVYDADDLFDKLLTRAERKQIDGNEISEKVRRFFSSSNKIGQAYYMSRKVKEIKKQLDEIVDRHTKFGFSAEFIPVCRERGNERETRSYIDVKNILGRDKDKNDIIDRLLNRNGNEACSFLTIVGAGGLGKTALAQLVFNDERVKIEFHDLRYWVCVSDQDGGQFDVKEILCKILEVVTKEKVDNSSTLELVQSQFQEKLRGKKYFLVLDDVWNEDREKWLPLEELLMLGQGGSKVVVTARSEKTANVIGKRHFYTLECLSPDYSWSLFEMSAFQKGHEQENHHELVDIGKKIVEKCYNNPLAITVVGSLLYGEEISKWRSFEMSELAKIGNGDNKILPILKLSYHNLIPSLKSCFSYCAVFPKDHEIKKEMLIDLWIAQGYVVALDGGQSIEDAAEEHFVILLRRCFFQDVKKDEYGDVDSVKIHDLMHDVAQEVGREEICVVNDNTKNLGDKIRHVHGDVNRYAQRVSLCSHSHKIRSYIGGDCEKRCVDTLIDKWMCLRMLDLSWSDVKNLPNSIGKLLHLRYLNLSDNRNLKILPDAITRLHNLQTLLLKDCRSLKELPKDFCKLVKLRHLDLWGCDDLIGMPFGMDKLTSLRILPNIVVGRKEQSVDDELKALKGLTEIKGDIDIKICENYRIVEGMNDTGGAGYLKSMKHLREIGITFDGGCVNPEAVLATLEPPSNIKSLSIHRFDGKTLPVWGRAEINWAISLSHLVDIQLWHCRNLQEMPVLSKLPHLKSLELYNLISLEYMESTSRSSSSDTEAATPELPTFFPSLEKLTLWGLEKLKGLGNRRSSSFPRLSELKIMECPDLTWFPPCPSLEKLTLWRLDKLKGFGNRRSSTFPRLSELEIKKCPDLTSFPSCPSLEKLELKESNEALQIIVKITTRGKEKEENNNAGVRNSQDDDKVKLRKMVIDNLGYLKSLPTNCLTHLDLTISDSKEGEGEWEVGDAFQKCVSSLRSLTIIGNHGINKVKRLSGRTGLEHFTLLESLKLSDIEDQEDEGEDNIIFWKSFPQNLRSLRIKDSDKMTSLPMGMQYLTSLQTLYLHHCYELNSLPEWISSLSSLQYLRIYYCPALKSLPEAMRNLTSLQTLGISDCPDLVKRCRKPNGKDYPKIQHIPYWSIEHQVITSL

SEQ ID NO: 70 - protein, 1202 aa, Spinacia oleracea
MAEIGYSVCAKLIEVIGSELIKEICDTWGYKSLLEDLNKTVLTVRNVLIQAGVMRELTSEQQGFIADLKDVVYDADDLFDKLLTRAERKQIDGNEISEKVRRFFSSSNKIGQAYYMSRKVKEIKKQLDEIVDRHTKFGFSAEFIPVCRERGNERETRSYIDVKNILGRDKDKNDIIDRLLNRNGNEACSFLTIVGAGGLGKTALAQLVFNDERVKIEFHDLRYWVCVSDQDGGQFDVKEILCKILEVVTKEKVDNSSTLELVQSQFQEKLRGKKYFLVLDDVWNEDREKWLPLEELLMLGQGGSKVVVTARSEKTANVIGKRHFYTLECLSPDYSWSLFEMSAFQKGHEQENHHELVDIGKKIVEKCYNNPLAITVVGSLLYGEEISKWRSFEMSELAKIGNGDNKILPILKLSYHNLIPSLKSCFSYCAVFPKDHEIKKEMLIDLWIAQGYVVALDGGQSIEDAAEEHFVILLRRCFFQDVKKDEYGDVDSVKIHDLMHDVAQEVGREEICVVNDNTKNLGDKIRHVHGDVNRYAQRVSLCSHSHKIRSYIGGDCEKRCVDTLIDKWMCLRMLDLSWSDVKNLPNSIGKLLHLRYLNLSDNRNLKILPDAITRLHNLQTLLLKDCRSLKELPKDFCKLVKLRHLDLWGCDDLIGMPFGMDKLTSLRILPNIVVGRKEQSVDDELKALKGLTEIKGDIDIKICENYRIVEGMNDTGGAGYLKSMKHLREIGITFDGGCVNPEAVLATLEPPSNIKSLSIHRFDGKTLPVWGRAEINWAISLSHLVDIQLWHCRNLQEMPVLSKLPHLKSLELYNLISLEYMESTSRSSSSDTEAATPELPTFFPSLEKLTLWGLEKLKGLGNRRSSSFPRLSELKIMECPDLTWFPPCPSLEKLTLWRLDKLKGFGNRRSSTFPRLSELEIKKCPDLTSFPSCPSLEKLELKESNEALQIIVKITTRGKEKEENNNAGVRNSQDDDKVKLRKMVIDNLGYLKSLPTNCLTHLDLTISDSKEGEGEWEVGDAFQKCVSSLRSLTIIGNHGINKVKRLSGRTGLEHFTLLESLKLSDIEDQEDEGEDNIIFWKSFPQNLRSLRIKDSDKMTSLPMGMQYLTSLQTLYLHHCYELNSLPEWISSLSSLQYLRIYYCPALKSLPEAMRNLTSLQTLGISDCPDLVKRCRKPNGKDYPKIQHIPYWSIEHQVLNEYW

SEQ ID NO: 71 - protein, 1213 aa, Spinacia oleracea
MAEIGYSVCAKLIEVIGSELIKEICDTWGYKSLLEDLNKTVLTVRNVLIQAGVMRELTSEQQGFIADLKDVVYDADDLFDKLLTRAERKQIDGNEISEKVRRFFSSSNKIGQAYYMSRKVKEIKKQLDEIVDRHTKFGFSAEFIPVCRERGNERETRSYIDVKNILGRDKDKNDIIDRLLNRNGNEACSFLTIVGAGGLGKTALAQLVFNDERVKIEFHDLRYWVCVSDQDGGQFDVKEILCKILEVVTKEKVDNSSTLELVQSQFQEKLRGKKYFLVLDDVWNEDREKWLPLEELLMLGQGGSKVVVTARSEKTANVIGKRHFYTLECLSPDYSWSLFEMSAFQKGHEQENHHELVDIGKKIVEKCYNNPLAITVVGSLLYGEEISKWRSFEMSELAKIGNGDNKILPILKLSYHNLIPSLKSCFSYCAVFPKDHEIKKEMLIDLWIAQGYVVALDGGQSIEDAAEEHFVILLRRCFFQDVKKDEYGDVDSVKIHDLMHDVAQEVGREEICVVNDNTKNLGDKIRHVHGDVNRYAQRVSLCSHSHKIRSYIGGDCEKRCVDTLIDKWMCLRMLDLSWSDVKNLPNSIGKLLHLRYLNLSDNRNLKILPDAITRLHNLQTLLLKDCRSLKELPKDFCKLVKLRHLDLWGCDDLIGMPFGMDKLTSLRILPNIVVGRKEQSVDDELKALKGLTEIKGDIDIKICENYRIVEGMNDTGGAGYLKSMKHLREIGITFDGGCVNPEAVLATLEPPSNIKSLSIHRFDGKTLPVWGRAEINWAISLSHLVDIQLWHCRNLQEMPVLSKLPHLKSLELYNLISLEYMESTSRSSSSDTEAATPELPTFFPSLEKLTLWGLEKLKGLGNRRSSSFPRLSELKIMECPDLTWFPPCPSLEKLTLWRLDKLKGFGNRRSSTFPRLSELEIKKCPDLTSFPSCPSLEKLELKESNEALQIIVKITTRGKEKEENNNAGVRNSQDDDKVKLRKMVIDNLGYLKSLPTNCLTHLDLTISDSKEGEGEWEVGDAFQKCVSSLRSLTIIGNHGINKVKRLSGRTGLEHFTLLESLKLSDIEDQEDEGEDNIIFWKSFPQNLRSLRIKDSDKMTSLPMGMQYLTSLQTLYLHHCYELNSLPEWISSLSSLQYLRIYYCPALKSLPEAMRNLTSLQTLGISDCPDLVKRCRKPNGKDYPKIQHIPYWSIEHQLLNTSLILNAPNLQDMD

SEQ ID NO: 72 - DNA, 5179 bp, Spinacia oleracea
atggccgaaatcggatactcggtttgtgcgaaactcatcgaagtgattggcagtgagctgatcaaagagatttgcgacacatggggttacaaatctcttcttgaggacctcaacaaaactgtattgacggtcaggaacgttctcattcaggccggggtgatgcgggagcttactagtgaacaacaaggtttcattgcagaccttaaagatgttgtttatgatgctgatgacttgttcgacaagttactcactcgtgctgagcgaaaacagattgatggaaacgaaatctctgaaaaggtacgtcgtttcttttcctctagtaacaagatcggtcaagcttactacatgtctcgtaaggttaaggaaattaagaagcagttggatgaaattgttgataggcatacaaaatttgggtttagtgctgagtttatacctgtttgtaggggaagggggaacgagagggaaacacgttcatatatagatgtcaagaatattcttgggagggataaagataagaatgatatcatagataggttgcttaatcgtaatgataatgaagcttgtagtttcctgaccatagtgggagcgggaggattgggaaaaactgctcttgcccaacttgtgttcaatgatgaaagggtcaaaattgagtttcatgatttgaggtattgggtttgtgtctctgatcaagatgggggccaatttgatgtgaaagaaatcctttgtaagattttagaggtggttactaaggagaaagttgataatagttccgcattggaattggtacaaagccaatttcaagagaagttaagaggaaagaagtacttccttgttcttgatgacgtatggaacgaggatcgtgagaagtggcttcgtttggaagagttgttaatgttgggtcaagggggaagcaaggttgtagtgaccacacgttctgagaaaacagcaaatgtcatagggaaaagacatttatatacactggaatgtttgtcaccagattattcatggagcttatttgaaatgtcggcttttcagaaagggcaggagcaggaaaaccatcacgaactagttcgtattgggaaaaagattgttgaaaaatgttataacaatccacttgtgataaccgtggttggaagtcttctttatggagaggagataagtaagtggcaatcatttgaaaggagtgagttggccaaaattggcaatggggataacaagattttgtcgatattgaagctcagttactacaatcttgcaaactctttgaagagttgttttagttattgtgcagtgtttcccaaggatcatgaaataaagaaggagatgttgattgaactttggatggcacaaggatatgttgtgccgttggatggaggtcaaagtatagaagatgctgccgaagaacattttgtaattttgttacgaaggtgtttctttcaagatgtaaagaaggatgaatatggtgatgtttatgctgttaaaatccacgacttgatgcacgatgtcgcccaagaagtggggagggaggaaatatgtgtagtgaatgataatacaaagaacttgggtgataaaatccgtcatgtacactgtgatgtcaatagatatgcacaaagagtctctctgtgtagccataagattcgttcgtatattggtggtaaatgtgaaaaacgttgggtggatacactaatagacaagtggatgtgtcttagggtgttggacttgtcaaggtcggatgttaaaaatttgcctaattcaataggtaaattgttgcacttgaggtgtcttaacctgtcttataataaagatctgttgatactccctgatgcaattacaagactgcataatttgcagacactgcttttaaaagattgcagaagtttaaaggagttgccaaaagatttttgcaaattggtcaaactgagacacttggatttaaggggttgtgatgatttgattggtatgccattgggaatggatatgctaactagtcttagagtactgccattctttgtggtgggtaggaaggaacaaagtgatgatgatgagctgaaagccctaaaaggcctcaccgagataaaaggcgacattgatatcaaaatctgttccaattatagaatagttgaaggcatgaatgacacaggaggagctgggtatttgaagagcatgaaacatctcacgggggttattattacatttgatgataatgaagatggatgtgttaaacctgaagctgtattggaaacccttgagccaccttcaaatatcaagaggttacttataggaaggtaccgtggtacaacaattccagtatggggaagagcagagattaattgggcaatctccctctcacatcttgtcgatatcacgcttatttattgttataatttgcaggagattccagtgctgagtaaactgcctcatttgaaattactggaactttataagttgattagcttagagtacatggagaatacaagcagaagcagtagcagtgacacagaagcagcaacactagaattaccaacattcttcccttcccttaaaaaacttacacttatcggtctgacaaagttgaagggtctggggaacaggagatcgagtagttttccccgcctctctaaattggtaatctgggaatgcccagatctaacgtggtttcctccttgtccaagccttgaaacgttgaaattggaaaaaaacaatgaagcgttgcaaataatagtaaaaataacaacaacaagaggtaaagaagaaaaagaagaagacaagaatgctggtgttggaaattcacaagatgatgacaatgtcaaattatggaaggtggaaatagacaatctgggttatctcaaatcactgcccacaaattgtctgactcacctcgacattacaataagagattccgaaggggaggagggtgaatgggaagttggggatacatttcagaagtgtgtatcttctttgagaagcctcgtcataatcggaaatcagggaataaataaagtgaatagactgtctggaagaacagggttggagcatttcactctgttggactcactcaaattttcagatatagacgaccaggaagatgagggcgaagacaacatcatgttctggaaatcctttcctcaaaacctccgcaatttggaaattaaatactctgacaaaatgacaagtttgcccatggggatgcagtacttaacctccctccaaaccatccatctttattgttgtggtaaattgaattccattccagaatggataagcagcttatcatctcttcaatccctgtacataggagaatgtccagccctaaaatcactaccagaagcaatgcagaacctcacctcccttcagagccttaggattttgggttgtccagacctaattgaaagatgcaaaaaacccaacggagaggactatcccaaaattcaacacatccccaaaattgtaagtcattgcagaaagtaatttattcatttatatttattttatgcttagaatgatatacaccgtcgtcctttggtttcaaatcttgaatttggtttttgttttctttctttgtttctttattcaacaccagcccatttatgattgattgattcattaaaaaaaggatggagttttgtggatttgaagaagacaacgaattgagattcctggggttttctttttgttggggttggttttcatgtatatgttgctgattaaatacgagactgatgatgattatgtgtttatgggttttaaatcagattaaatatatggaaaatgtaagttagttggggatgcacataaggtgtttgatgaaatgtctattagaaatgttgtttcttggacttagaatgatatacactgtcgtcctttggtttccaatcttacatttggtttgtgttttcttagtttgtttctttaatcaacaccagcccattttttttaaactacctgcaactactaattttcatttaccctgtatctcaggaactatggcggtaattctcatttactcaacactaagcttgatcctgaacgcagccaaccttcaggttagaatctgccttactcatccttttgtcatgcattgttttaaggtgttttgcttgcttgtgtaatcataatttatagtatacgattcatcattcactatgtctagaggcaagatattggaattgtacgattccctgaagtttctttgtttttgttgataccaccatattgcagcttatagtgactaagttaatgaatgtttccaaaaaattagtcatataaattcttcttctctctctattacataaactctttttctctttctaacttatcatgttcatgcctaaaacttatacatgctcacatcattgttcgtttgagctgacttacttctgtaagagagctatctagttaacaactcttgtaactttttatttgctagtcagaacatggattggtgcaagcatgggaatttgccaacactctaccaaatcgattggagtttggacttagtttcaccagaagccatacccggccacttactggggactgtcaacaaagccgcattgtgatgtacttggatgtttcacgtgcctgaggtgcgagttacttggaagggaagcggtttatttaattgttttcctaagtagattttgcttagaagcttttacttttcacttgaaagggtttttcttgttttaagcttttcgaattagagtttcggttgcattaagagtagtcgtattagtctttttttacctaaggaagacttttttgtaattttcagacgatgcaattcaacttttcgagtgttttgtttgaattgaagaattagtgatttcatttgatcgattgagatgtcttattataagcgtatatgctcttggatttggccacttaggtcttgtttgacaattggttattaactcgcttttatattttcttttctcttaggaaaggtgatcctgagaatttatattggaacactttttttctctctcactagctttaaaaaagtgttctgtgttacctgcaattcaatttgattatttttcacatagttttacctgaaaaagtgttacctgaaaatcaactgacataaatttttgtttggatccaattaaggacactagataagtcggaaaaaataatcaaccaattaagtacttcataattaagtatattattatcttgt

SEQ ID NO: 73 - DNA, 1121 bp, Spinacia oleracea
atcagaaaaccaaccttctccagtttactgttgtctaaagccaaagagcatggaattttccagtaatcgcagaccccaaattctcttctccaatcgtccctgtcaatttcagcaattgaatcaatcgttgattttaggatttgccgccaaaaaaatgaaaaatccatgaattttagggttcaaatttgatccgtaattgggaaaattttcagcaattgatcttccaaatcattcatacttgtttccagactgcaaatgaaaggtgcgaactttatactgcattttgattttccattactgtaatttattaagatgaactgcaatttgcaattgttttattcgactactcatctttaaatcaaattgctaaattgctagctaattttcttatcatattgccaaaaatttgttgcttaaatgattccatttctctaattatttttgttttattggtagataaataattaaatatcagccccattaattgaatattcaaaggaaatgtatggtccaaaaatggcgtttaatagtcaatgccgtgttttatggggtggtggagtactatatgactgtgtgtggacttggagaagactagagagtattgattatcaaaatatggaccctgaaaatgaaaatgaaaatgatgtttttacactttaaaatcgtcaagaaacaacaatcctctttagcaatagtatttacacgcgttatttgcacggacttcaatgcaaatagtataaatttacagtcaaagttttcattctaaagcgtaaataactttcatgaatggaggacggtagtataagtataacgttatggcctaccattttcttatcatattcacataaatttgttgctaaaagttgttttacttggctaaaatacttttgttcttattggcagataaacatcagtccattattggccaacttgaacatatacctccaaacaataatcaataatgtcgattatgaagtttgtgaatgcaatttattatcactttcatttataaaatgactacttgattaacacatacaatattacctttctccaaacaccctttcaattctgcttaatcttgttttctcatcatctcttcatctttctgaaaacacaaccca

SEQ ID NO: 74 - DNA, 3462 bp, Spinacia oleracea
atggccgaaatcggatactcggtttgtgcgaaactcatcgaagtgattggcagtgagctgatcaaagagatttgcgacacatggggttacaaatctcttcttgaggacctcaacaaaactgtattgacggtcaggaacgttctcattcaggccggggtgatgcgggagcttactagtgaacaacaaggtttcattgcagaccttaaagatgttgtttatgatgctgatgacttgttcgacaagttactcactcgtgctgagcgaaaacagattgatggaaacgaaatctctgaaaaggtacgtcgtttcttttcctctagtaacaagatcggtcaagcttactacatgtctcgtaaggttaaggaaattaagaagcagttggatgaaattgttgataggcatacaaaatttgggtttagtgctgagtttatacctgtttgtaggggaagggggaacgagagggaaacacgttcatatatagatgtcaagaatattcttgggagggataaagataagaatgatatcatagataggttgcttaatcgtaatgataatgaagcttgtagtttcctgaccatagtgggagcgggaggattgggaaaaactgctcttgcccaacttgtgttcaatgatgaaagggtcaaaattgagtttcatgatttgaggtattgggtttgtgtctctgatcaagatgggggccaatttgatgtgaaagaaatcctttgtaagattttagaggtggttactaaggagaaagttgataatagttccgcattggaattggtacaaagccaatttcaagagaagttaagaggaaagaagtacttccttgttcttgatgacgtatggaacgaggatcgtgagaagtggcttcgtttggaagagttgttaatgttgggtcaagggggaagcaaggttgtagtgaccacacgttctgagaaaacagcaaatgtcatagggaaaagacatttatatacactggaatgtttgtcaccagattattcatggagcttatttgaaatgtcggcttttcagaaagggcaggagcaggaaaaccatcacgaactagttcgtattgggaaaaagattgttgaaaaatgttataacaatccacttgtgataaccgtggttggaagtcttctttatggagaggagataagtaagtggcaatcatttgaaaggagtgagttggccaaaattggcaatggggataacaagattttgtcgatattgaagctcagttactacaatcttgcaaactctttgaagagttgttttagttattgtgcagtgtttcccaaggatcatgaaataaagaaggagatgttgattgaactttggatggcacaaggatatgttgtgccgttggatggaggtcaaagtatagaagatgctgccgaagaacattttgtaattttgttacgaaggtgtttctttcaagatgtaaagaaggatgaatatggtgatgtttatgctgttaaaatccacgacttgatgcacgatgtcgcccaagaagtggggagggaggaaatatgtgtagtgaatgataatacaaagaacttgggtgataaaatccgtcatgtacactgtgatgtcaatagatatgcacaaagagtctctctgtgtagccataagattcgttcgtatattggtggtaaatgtgaaaaacgttgggtggatacactaatagacaagtggatgtgtcttagggtgttggacttgtcaaggtcggatgttaaaaatttgcctaattcaataggtaaattgttgcacttgaggtgtcttaacctgtcttataataaagatctgttgatactccctgatgcaattacaagactgcataatttgcagacactgcttttaaaagattgcagaagtttaaaggagttgccaaaagatttttgcaaattggtcaaactgagacacttggatttaaggggttgtgatgatttgattggtatgccattgggaatggatatgctaactagtcttagagtactgccattctttgtggtgggtaggaaggaacaaagtgatgatgatgagctgaaagccctaaaaggcctcaccgagataaaaggcgacattgatatcaaaatctgttccaattatagaatagttgaaggcatgaatgacacaggaggagctgggtatttgaagagcatgaaacatctcacgggggttattattacatttgatgataatgaagatggatgtgttaaacctgaagctgtattggaaacccttgagccaccttcaaatatcaagaggttacttataggaaggtaccgtggtacaacaattccagtatggggaagagcagagattaattgggcaatctccctctcacatcttgtcgatatcacgcttatttattgttataatttgcaggagattccagtgctgagtaaactgcctcatttgaaattactggaactttataagttgattagcttagagtacatggagaatacaagcagaagcagtagcagtgacacagaagcagcaacactagaattaccaacattcttcccttcccttaaaaaacttacacttatcggtctgacaaagttgaagggtctggggaacaggagatcgagtagttttccccgcctctctaaattggtaatctgggaatgcccagatctaacgtggtttcctccttgtccaagccttgaaacgttgaaattggaaaaaaacaatgaagcgttgcaaataatagtaaaaataacaacaacaagaggtaaagaagaaaaagaagaagacaagaatgctggtgttggaaattcacaagatgatgacaatgtcaaattatggaaggtggaaatagacaatctgggttatctcaaatcactgcccacaaattgtctgactcacctcgacattacaataagagattccgaaggggaggagggtgaatgggaagttggggatacatttcagaagtgtgtatcttctttgagaagcctcgtcataatcggaaatcagggaataaataaagtgaatagactgtctggaagaacagggttggagcatttcactctgttggactcactcaaattttcagatatagacgaccaggaagatgagggcgaagacaacatcatgttctggaaatcctttcctcaaaacctccgcaatttggaaattaaatactctgacaaaatgacaagtttgcccatggggatgcagtacttaacctccctccaaaccatccatctttattgttgtggtaaattgaattccattccagaatggataagcagcttatcatctcttcaatccctgtacataggagaatgtccagccctaaaatcactaccagaagcaatgcagaacctcacctcccttcagagccttaggattttgggttgtccagacctaattgaaagatgcaaaaaacccaacggagaggactatcccaaaattcaacacatccccaaaattgaactatggcggtaa

SEQ ID NO: 75 - protein, 1153 aa, Spinacia oleracea
MAEIGYSVCAKLIEVIGSELIKEICDTWGYKSLLEDLNKTVLTVRNVLIQAGVMRELTSEQQGFIADLKDVVYDADDLFDKLLTRAERKQIDGNEISEKVRRFFSSSNKIGQAYYMSRKVKEIKKQLDEIVDRHTKFGFSAEFIPVCRGRGNERETRSYIDVKNILGRDKDKNDIIDRLLNRNDNEACSFLTIVGAGGLGKTALAQLVFNDERVKIEFHDLRYWVCVSDQDGGQFDVKEILCKILEVVTKEKVDNSSALELVQSQFQEKLRGKKYFLVLDDVWNEDREKWLRLEELLMLGQGGSKVVVTTRSEKTANVIGKRHLYTLECLSPDYSWSLFEMSAFQKGQEQENHHELVRIGKKIVEKCYNNPLVITVVGSLLYGEEISKWQSFERSELAKIGNGDNKILSILKLSYYNLANSLKSCFSYCAVFPKDHEIKKEMLIELWMAQGYVVPLDGGQSIEDAAEEHFVILLRRCFFQDVKKDEYGDVYAVKIHDLMHDVAQEVGREEICVVNDNTKNLGDKIRHVHCDVNRYAQRVSLCSHKIRSYIGGKCEKRWVDTLIDKWMCLRVLDLSRSDVKNLPNSIGKLLHLRCLNLSYNKDLLILPDAITRLHNLQTLLLKDCRSLKELPKDFCKLVKLRHLDLRGCDDLIGMPLGMDMLTSLRVLPFFVVGRKEQSDDDELKALKGLTEIKGDIDIKICSNYRIVEGMNDTGGAGYLKSMKHLTGVIITFDDNEDGCVKPEAVLETLEPPSNIKRLLIGRYRGTTIPVWGRAEINWAISLSHLVDITLIYCYNLQEIPVLSKLPHLKLLELYKLISLEYMENTSRSSSSDTEAATLELPTFFPSLKKLTLIGLTKLKGLGNRRSSSFPRLSKLVIWECPDLTWFPPCPSLETLKLEKNNEALQIIVKITTTRGKEEKEEDKNAGVGNSQDDDNVKLWKVEIDNLGYLKSLPTNCLTHLDITIRDSEGEEGEWEVGDTFQKCVSSLRSLVIIGNQGINKVNRLSGRTGLEHFTLLDSLKFSDIDDQEDEGEDNIMFWKSFPQNLRNLEIKYSDKMTSLPMGMQYLTSLQTIHLYCCGKLNSIPEWISSLSSLQSLYIGECPALKSLPEAMQNLTSLQSLRILGCPDLIERCKKPNGEDYPKIQHIPKIELWR

SEQ ID NO: 76 - DNA, 6853 bp, Spinacia oleracea
atggccgaaatcggatactcggtttgtgcgaaactcatcgaagtgattggcagtgagctgatcaaagagatttgtgacacatggggttacaaatctcttcttgaggacctcaacaaaactgtattgacggtcaggaacgttctcattcaagccggggtgatgcgggagcttactagtgaacaacaaggtttcattgcagaccttaaagatgttgtttatgatgctgatgacttgttcgacaagttactcactcgtgctgagcgaaaacagattgatggaaacgaaatctctgaaaaggtacgtcgtttcttttcctctagtaacaagatcggtcaagcttactacatgtctcgtaaggttaaggaaattaagaagcagttggatgaaattgttgataggcatacaaaatttgggtttagtgccgagtttatacctgtttgtagggaaagggggaacgagagggaaacacgttcatatatagatgtcaagaatattcttgggagggataaagataagaatgatatcatagataggttgcttaatcgtaatggtaatgaagcttgtagtttcctgaccatagtgggagcgggaggattgggaaaaactgctcttgcacaacttgtgttcaatgatgaaagggtcaaaattgagttccatgatttgaggtattgggtttgtgtctctgatcaagatgggggccaatttgatgtgaaagaaatcctttgtaagattttagaggtggttactaaggagaaagttgataatagttccacattggaattggtacaaagccaatttcaagagaagttaagaggaaagaagtacttccttgttcttgatgatgtatggaacgaagatcgtgagaagtggcttcctttggaagagttgttaatgttgggtcaagggggaagcaaggttgtagtgaccgcacgttcagagaagacagcaaatgtcatagggaaaagacatttttatacactggaatgtttgtcaccagattattcatggagcttatttgaaatgtcggcttttcagaaagggcatgagcaggaaaaccatcacgaactagttgatattgggaaaaagattgttgaaaaatgttataacaatccacttgctataacggtggtaggaagtcttctttatggagaggagataagtaagtggcggtcatttgaaatgagtgagttggccaaaattggcaatggggataataagattttgccgatattaaagctcagttaccataatcttataccctcgttgaagagttgcttcagttattgtgcagtgtttcccaaggatcatgaaataaagaaggagatgttgattgatctttggatagcacaaggatacgttgtggcacttgatggaggtcaaagtatagaagatgctgccgaagaacattttgtaattttgttacggagatgtttctttcaagatgtaaagaaggatgaatatggtgatgttgattctgttaaaatccacgacttgatgcacgatgtcgcccaagaagtggggagggaggaaatatgtgtagtgaatgataatacaaagaacttgggtgataaaatccgtcatgtacatggtgatgtcaatagatatgcacaaagagtctctctgtgtagccatagccataagattcgttcgtatattggtggtgattgtgaaaaacgttgtgtggatacactaatagacaagtggatgtgtcttaggatgttggacttgtcatggtcggatgttaaaaatttgcctaattcaataggtaaattgttgcacttgaggtatcttaacctgtcagataatagaaatctaaagatacttcctgatgcaattacaagactgcataatttgcagacactgcttttagaagattgcagaagtttaaaggagttgccaaaagatttttgcaaattggtcaaactgaggcacttggaattacagggttgtcatgatttgattggtatgccatttggaatggataagctaactagtcttagaatactaccaaacattgtggtgggtaggaaggaacaaagtgatgatgagctgaaagccctaaaaggcctcaccgagataaaaggctccatttctatcagaatctattcaaagtatagaatagttgaaggcatgaatgacacaggaggagctgcttatttgaagagcatgaaacatctcagggagattgatattacatttttgggtgaatgtgttggccctgaagctgtattggaaaccttagagccaccttcaaatatcaagagcttatatatatataattacagtggtacaacaattccagtatggggaagagcagagattaattgggcaatctccctctcacatctcgtcgacatccagcttagttgttgtagtaatttgcaggagatgccagtgctgagtaaactgcctcatttgaaatcgctgaaacttggatggttggataacttagagtacatggagagtagcagtagcagtgacacagaagcagcaacaccagaattaccaacattcttcccttcccttgaaaaacttactttacagcatctggaaaagttgaagggttttgggaacaggagatcgagtagttttccccgcctctctgaattggaaatcaagaaatgcccagatctaacgtcatttccttcttgtccaagccttgagaagttggaattgaaagaaagcaatgaagcattgcaaataatagtaaaaataacaacaagaggtaaagaaaaagaagagaacaataatgctggtgttagaaattcacaagatgatgacaaagtcaaattacggaagatggtgatagacaatctgggttatctcacgggggttgatattagatttgatgatagagaaggtggatttgttaaccctgaagctgtgttggcaaccctagagccaccttcaaatatcaagagcttatctatacatcgttttgatggtaaaacacttccagtatggggaagagcagagattaattgggcaatctccctctcacatcttgtcgacatccagctttggcattgtcgtaatttgcaggagatgccagtgctgagtaaactgcctcatttgaaatcactggaactttataatttgattagtttagagtacatggagagcacaagcagaagcagtagcagtgacacagaagcagcaacaccagaattaccaacattcttcccttcccttgaaaaacttagactttggtatctggaaaagttgaagggtttggggaacaggagaccgagtagttttccccgcctctctgaattggaaatctgggaatgcccagatctaacgtggtttcctccttgtccaagccttaaaacgttgaaattggaaaaaaacaatgaagcgttgcaaataatagtaaaaataacaacaacaagaggtaaagaagaaaaagaagaagacaagaatgctggtgttggaaattcacaagatgatgacaatgtcaaattacggaaggtggaaatagacaatgtgagttatctcaaatcactgcccacaaattgtcttactcacctcaaaataactggaatagattacagggagggggagattgaatcagattccgtggaggaggagattgaattggaagttggggaggcatttcagaagtgtgcatcttctttgagaagcctcatcataatcggaaatcacggaataaataaagtgatgagactgtctggaagaacagggttggagcatttcactctgttggactcactcaaattttcaaagatagaagaccaggaagatgagggcgaagacaacatcatattctggaaatcctttcctcaaaaccttcgcagtttgagaattaaagactctgacaaaatgacaagtttgcccatggggatgcagtacttaacctccctccaaaccctcgaactatcatattgtgatgaattgaattcccttccagaatggataagcagcttatcatctcttcaatacctgcgcatatactactgtccagccctgaaatcactaccagaagcaatgcggaacctcacctcccttcagacacttgggatatcggattgtccagacctagttaaaagatgcagaaaacccaacggcaaggactatcccaaaattcaacacatccccaaaattgtaagtcattgcagaaagtaatttattcatttatatttattttatgcttagaatgatatacgcagtcgtcctttggtttcaaatcttgaatttggtttttgttttctttctttgtttctttattcaacaccagcccatttatgattgattcattaaaaaaaggatggagttttatggatttgaagaagacaacgaattgagattcctggggttttctttttgttggggttggatttcatgtatatgttgctgattaaatacgagactgatgatgatgatgtgtttatgggttttaaatcagattaaatatatgggaaatgcaagttaatttgggatgcacataaggtgtttgctgaaatgtctatgagaaatgttgtttcttggacttagaatgatatacactgtcgtcctttggtttccaatcttacatttggtttgtgttttcttagtttgtttctttaatcaacaccaacccgttttttttaaactacctgcaactactaatttacgtttaccctgtatctcaggtactaaatgaatattggtgattttcagttactcaacactagcttgatcctgaacgcacccaaccttcaggttagaatccggcttactcatccttttgtccagttttcaagtaattgttttggcaggatcaattctctaattgttgtacaccgtatattgcaatttatagtgactacagttaatgaatgtttacaaaaaattagtcatgtaaaaacttcttctctgtccattacataaactctttttctctttctaacttatcatgttcatgtctaaacaattaaacatgctcacatcaatgttcatttaagctaacttacttctgtaagagagcgagctagttaaaaactcctttaactttctgttttatactcaggacatggattgatgcaagcatgaagaacttcgggaatttgctaaaactctaccaaagcgatgagagtttggactttatttcacttgaagtcagggactgtcaacaaagccacagtgtgcatgttggctgtttcacttggacgataaaaaggtttatttaattgttttcctaagtgtatttggcttacaagcttttacttttcacttgaaagggtttttcttgttttaagcttttcgaattagagttttcggttgaagtaagagtagtcgtattagtcttttacctaaggaagactcttttttgtaattttcagactatgcaattcaagttttcgagtgttttcttgcttgtgtgattgtgagttggtgaattcgtctttcatacattttgagattatcagaagctttatgctccaccggtagtctagtaccttttctgttactgtgcagggaagtaatctggtaccttctatatatatggaaaaacatacattatacattatgcaaaattcttacaggttagttacttcctggaacttcatttacacttagttttttttgttccattccctcggaatcaagtcattccctctgagaaatatgtaatgaacttctgtatgttgctgtttggttcctgttttaatcttcaattttcttgtatagttacagctgcatttacaatgaagtttaagcagacactctctttatatagtgcctctttctggagcaccgtagagctgtctgtggttgatcaccatctgctgccgagagattcagcaatcgcgtgtttgatcaggtaaaagtttttatgtcaatgtgtttttttttccgtttgatcaatttatgtctgtattcagattcttatcttcttacagtagcataacacattgtttctttcatttatgtaaactgtttcaagattacagagatgtatgcttcagtcgacattgatgataacttaagatggcattcctacaacagttgcaggcgcattctaactccggcaattctagttaggcaagaggagcattgccaatacctgccacctctgggatttactataccagggttgaagtttatggaagacaccagctatgcacaagccttcaaggggtcatcctacataacaagttgaaccaaccaattgcttgttggttcagtggtaattgaagctgaatttggtagggatggcccgtgttcgatccccacaacaacaattgggaggggactggaacctatccacacagaactcgccctgaatccggattagccctaagggtgaacggggtgctaacaccaaaaaaaaaaacataacaagttgaaccaaacatactttgtttgaattgaagatttagtgatttcatttgatcgattgagatgtcttattataagcgtatatgctcttggatttggccacttaggtgttgtttgacaattggacattaactcgcttttatattttcttttctcttaggaaaggtgatcctgagaatttatattggaacactttttttttctcactagctttaaaaaagtgttctgtgttacctgcaattcaatttgattatttttcacatagttttacctgaaaaagtgttacctgaaaaagtgttacctgaaaatcaactgacataagtttttgtttggatccaattaaggacactagataaatcggaataaataatcaaccaattaagtacttcataattaaatatgaagtgtattattatcttatgcttgtgacattgaaggatgttatgatattttaactcaataccttgcaaaatatactggttaaatttcttaacaaggtaacttggcaaca

SEQ ID NO: 77 - DNA, 2000 bp, Spinacia oleracea; identical to SEQ ID NO: 13

SEQ ID NO: 78 - DNA, 4146 bp, Spinacia oleracea
atggccgaaatcggatactcggtttgtgcgaaactcatcgaagtgattggcagtgagctgatcaaagagatttgtgacacatggggttacaaatctcttcttgaggacctcaacaaaactgtattgacggtcaggaacgttctcattcaagccggggtgatgcgggagcttactagtgaacaacaaggtttcattgcagaccttaaagatgttgtttatgatgctgatgacttgttcgacaagttactcactcgtgctgagcgaaaacagattgatggaaacgaaatctctgaaaaggtacgtcgtttcttttcctctagtaacaagatcggtcaagcttactacatgtctcgtaaggttaaggaaattaagaagcagttggatgaaattgttgataggcatacaaaatttgggtttagtgccgagtttatacctgtttgtagggaaagggggaacgagagggaaacacgttcatatatagatgtcaagaatattcttgggagggataaagataagaatgatatcatagataggttgcttaatcgtaatggtaatgaagcttgtagtttcctgaccatagtgggagcgggaggattgggaaaaactgctcttgcacaacttgtgttcaatgatgaaagggtcaaaattgagttccatgatttgaggtattgggtttgtgtctctgatcaagatgggggccaatttgatgtgaaagaaatcctttgtaagattttagaggtggttactaaggagaaagttgataatagttccacattggaattggtacaaagccaatttcaagagaagttaagaggaaagaagtacttccttgttcttgatgatgtatggaacgaagatcgtgagaagtggcttcctttggaagagttgttaatgttgggtcaagggggaagcaaggttgtagtgaccgcacgttcagagaagacagcaaatgtcatagggaaaagacatttttatacactggaatgtttgtcaccagattattcatggagcttatttgaaatgtcggcttttcagaaagggcatgagcaggaaaaccatcacgaactagttgatattgggaaaaagattgttgaaaaatgttataacaatccacttgctataacggtggtaggaagtcttctttatggagaggagataagtaagtggcggtcatttgaaatgagtgagttggccaaaattggcaatggggataataagattttgccgatattaaagctcagttaccataatcttataccctcgttgaagagttgcttcagttattgtgcagtgtttcccaaggatcatgaaataaagaaggagatgttgattgatctttggatagcacaaggatacgttgtggcacttgatggaggtcaaagtatagaagatgctgccgaagaacattttgtaattttgttacggagatgtttctttcaagatgtaaagaaggatgaatatggtgatgttgattctgttaaaatccacgacttgatgcacgatgtcgcccaagaagtggggagggaggaaatatgtgtagtgaatgataatacaaagaacttgggtgataaaatccgtcatgtacatggtgatgtcaatagatatgcacaaagagtctctctgtgtagccatagccataagattcgttcgtatattggtggtgattgtgaaaaacgttgtgtggatacactaatagacaagtggatgtgtcttaggatgttggacttgtcatggtcggatgttaaaaatttgcctaattcaataggtaaattgttgcacttgaggtatcttaacctgtcagataatagaaatctaaagatacttcctgatgcaattacaagactgcataatttgcagacactgcttttagaagattgcagaagtttaaaggagttgccaaaagatttttgcaaattggtcaaactgaggcacttggaattacagggttgtcatgatttgattggtatgccatttggaatggataagctaactagtcttagaatactaccaaacattgtggtgggtaggaaggaacaaagtgatgatgagctgaaagccctaaaaggcctcaccgagataaaaggctccatttctatcagaatctattcaaagtatagaatagttgaaggcatgaatgacacaggaggagctgcttatttgaagagcatgaaacatctcagggagattgatattacatttttgggtgaatgtgttggccctgaagctgtattggaaaccttagagccaccttcaaatatcaagagcttatatatatataattacagtggtacaacaattccagtatggggaagagcagagattaattgggcaatctccctctcacatctcgtcgacatccagcttagttgttgtagtaatttgcaggagatgccagtgctgagtaaactgcctcatttgaaatcgctgaaacttggatggttggataacttagagtacatggagagtagcagtagcagtgacacagaagcagcaacaccagaattaccaacattcttcccttcccttgaaaaacttactttacagcatctggaaaagttgaagggttttgggaacaggagatcgagtagttttccccgcctctctgaattggaaatcaagaaatgcccagatctaacgtcatttccttcttgtccaagccttgagaagttggaattgaaagaaagcaatgaagcattgcaaataatagtaaaaataacaacaagaggtaaagaaaaagaagagaacaataatgctggtgttagaaattcacaagatgatgacaaagtcaaattacggaagatggtgatagacaatctgggttatctcacgggggttgatattagatttgatgatagagaaggtggatttgttaaccctgaagctgtgttggcaaccctagagccaccttcaaatatcaagagcttatctatacatcgttttgatggtaaaacacttccagtatggggaagagcagagattaattgggcaatctccctctcacatcttgtcgacatccagctttggcattgtcgtaatttgcaggagatgccagtgctgagtaaactgcctcatttgaaatcactggaactttataatttgattagtttagagtacatggagagcacaagcagaagcagtagcagtgacacagaagcagcaacaccagaattaccaacattcttcccttcccttgaaaaacttagactttggtatctggaaaagttgaagggtttggggaacaggagaccgagtagttttccccgcctctctgaattggaaatctgggaatgcccagatctaacgtggtttcctccttgtccaagccttaaaacgttgaaattggaaaaaaacaatgaagcgttgcaaataatagtaaaaataacaacaacaagaggtaaagaagaaaaagaagaagacaagaatgctggtgttggaaattcacaagatgatgacaatgtcaaattacggaaggtggaaatagacaatgtgagttatctcaaatcactgcccacaaattgtcttactcacctcaaaataactggaatagattacagggagggggagattgaatcagattccgtggaggaggagattgaattggaagttggggaggcatttcagaagtgtgcatcttctttgagaagcctcatcataatcggaaatcacggaataaataaagtgatgagactgtctggaagaacagggttggagcatttcactctgttggactcactcaaattttcaaagatagaagaccaggaagatgagggcgaagacaacatcatattctggaaatcctttcctcaaaaccttcgcagtttgagaattaaagactctgacaaaatgacaagtttgcccatggggatgcagtacttaacctccctccaaaccctcgaactatcatattgtgatgaattgaattcccttccagaatggataagcagcttatcatctcttcaatacctgcgcatatactactgtccagccctgaaatcactaccagaagcaatgcggaacctcacctcccttcagacacttgggatatcggattgtccagacctagttaaaagatgcagaaaacccaacggcaaggactatcccaaaattcaacacatccccaaaattgtactaaatgaatattggtga

SEQ ID NO: 79 - DNA, 4179 bp, Spinacia oleracea
atggccgaaatcggatactcggtttgtgcgaaactcatcgaagtgattggcagtgagctgatcaaagagatttgtgacacatggggttacaaatctcttcttgaggacctcaacaaaactgtattgacggtcaggaacgttctcattcaagccggggtgatgcgggagcttactagtgaacaacaaggtttcattgcagaccttaaagatgttgtttatgatgctgatgacttgttcgacaagttactcactcgtgctgagcgaaaacagattgatggaaacgaaatctctgaaaaggtacgtcgtttcttttcctctagtaacaagatcggtcaagcttactacatgtctcgtaaggttaaggaaattaagaagcagttggatgaaattgttgataggcatacaaaatttgggtttagtgccgagtttatacctgtttgtagggaaagggggaacgagagggaaacacgttcatatatagatgtcaagaatattcttgggagggataaagataagaatgatatcatagataggttgcttaatcgtaatggtaatgaagcttgtagtttcctgaccatagtgggagcgggaggattgggaaaaactgctcttgcacaacttgtgttcaatgatgaaagggtcaaaattgagttccatgatttgaggtattgggtttgtgtctctgatcaagatgggggccaatttgatgtgaaagaaatcctttgtaagattttagaggtggttactaaggagaaagttgataatagttccacattggaattggtacaaagccaatttcaagagaagttaagaggaaagaagtacttccttgttcttgatgatgtatggaacgaagatcgtgagaagtggcttcctttggaagagttgttaatgttgggtcaagggggaagcaaggttgtagtgaccgcacgttcagagaagacagcaaatgtcatagggaaaagacatttttatacactggaatgtttgtcaccagattattcatggagcttatttgaaatgtcggcttttcagaaagggcatgagcaggaaaaccatcacgaactagttgatattgggaaaaagattgttgaaaaatgttataacaatccacttgctataacggtggtaggaagtcttctttatggagaggagataagtaagtggcggtcatttgaaatgagtgagttggccaaaattggcaatggggataataagattttgccgatattaaagctcagttaccataatcttataccctcgttgaagagttgcttcagttattgtgcagtgtttcccaaggatcatgaaataaagaaggagatgttgattgatctttggatagcacaaggatacgttgtggcacttgatggaggtcaaagtatagaagatgctgccgaagaacattttgtaattttgttacggagatgtttctttcaagatgtaaagaaggatgaatatggtgatgttgattctgttaaaatccacgacttgatgcacgatgtcgcccaagaagtggggagggaggaaatatgtgtagtgaatgataatacaaagaacttgggtgataaaatccgtcatgtacatggtgatgtcaatagatatgcacaaagagtctctctgtgtagccatagccataagattcgttcgtatattggtggtgattgtgaaaaacgttgtgtggatacactaatagacaagtggatgtgtcttaggatgttggacttgtcatggtcggatgttaaaaatttgcctaattcaataggtaaattgttgcacttgaggtatcttaacctgtcagataatagaaatctaaagatacttcctgatgcaattacaagactgcataatttgcagacactgcttttagaagattgcagaagtttaaaggagttgccaaaagatttttgcaaattggtcaaactgaggcacttggaattacagggttgtcatgatttgattggtatgccatttggaatggataagctaactagtcttagaatactaccaaacattgtggtgggtaggaaggaacaaagtgatgatgagctgaaagccctaaaaggcctcaccgagataaaaggctccatttctatcagaatctattcaaagtatagaatagttgaaggcatgaatgacacaggaggagctgcttatttgaagagcatgaaacatctcagggagattgatattacatttttgggtgaatgtgttggccctgaagctgtattggaaaccttagagccaccttcaaatatcaagagcttatatatatataattacagtggtacaacaattccagtatggggaagagcagagattaattgggcaatctccctctcacatctcgtcgacatccagcttagttgttgtagtaatttgcaggagatgccagtgctgagtaaactgcctcatttgaaatcgctgaaacttggatggttggataacttagagtacatggagagtagcagtagcagtgacacagaagcagcaacaccagaattaccaacattcttcccttcccttgaaaaacttactttacagcatctggaaaagttgaagggttttgggaacaggagatcgagtagttttccccgcctctctgaattggaaatcaagaaatgcccagatctaacgtcatttccttcttgtccaagccttgagaagttggaattgaaagaaagcaatgaagcattgcaaataatagtaaaaataacaacaagaggtaaagaaaaagaagagaacaataatgctggtgttagaaattcacaagatgatgacaaagtcaaattacggaagatggtgatagacaatctgggttatctcacgggggttgatattagatttgatgatagagaaggtggatttgttaaccctgaagctgtgttggcaaccctagagccaccttcaaatatcaagagcttatctatacatcgttttgatggtaaaacacttccagtatggggaagagcagagattaattgggcaatctccctctcacatcttgtcgacatccagctttggcattgtcgtaatttgcaggagatgccagtgctgagtaaactgcctcatttgaaatcactggaactttataatttgattagtttagagtacatggagagcacaagcagaagcagtagcagtgacacagaagcagcaacaccagaattaccaacattcttcccttcccttgaaaaacttagactttggtatctggaaaagttgaagggtttggggaacaggagaccgagtagttttccccgcctctctgaattggaaatctgggaatgcccagatctaacgtggtttcctccttgtccaagccttaaaacgttgaaattggaaaaaaacaatgaagcgttgcaaataatagtaaaaataacaacaacaagaggtaaagaagaaaaagaagaagacaagaatgctggtgttggaaattcacaagatgatgacaatgtcaaattacggaaggtggaaatagacaatgtgagttatctcaaatcactgcccacaaattgtcttactcacctcaaaataactggaatagattacagggagggggagattgaatcagattccgtggaggaggagattgaattggaagttggggaggcatttcagaagtgtgcatcttctttgagaagcctcatcataatcggaaatcacggaataaataaagtgatgagactgtctggaagaacagggttggagcatttcactctgttggactcactcaaattttcaaagatagaagaccaggaagatgagggcgaagacaacatcatattctggaaatcctttcctcaaaaccttcgcagtttgagaattaaagactctgacaaaatgacaagtttgcccatggggatgcagtacttaacctccctccaaaccctcgaactatcatattgtgatgaattgaattcccttccagaatggataagcagcttatcatctcttcaatacctgcgcatatactactgtccagccctgaaatcactaccagaagcaatgcggaacctcacctcccttcagacacttgggatatcggattgtccagacctagttaaaagatgcagaaaacccaacggcaaggactatcccaaaattcaacacatccccaaaattttactcaacactagcttgatcctgaacgcacccaaccttcaggacatggattga

SEQ ID NO: 80 - protein, 1381 aa, Spinacia oleracea
MAEIGYSVCAKLIEVIGSELIKEICDTWGYKSLLEDLNKTVLTVRNVLIQAGVMRELTSEQQGFIADLKDVVYDADDLFDKLLTRAERKQIDGNEISEKVRRFFSSSNKIGQAYYMSRKVKEIKKQLDEIVDRHTKFGFSAEFIPVCRERGNERETRSYIDVKNILGRDKDKNDIIDRLLNRNGNEACSFLTIVGAGGLGKTALAQLVFNDERVKIEFHDLRYWVCVSDQDGGQFDVKEILCKILEVVTKEKVDNSSTLELVQSQFQEKLRGKKYFLVLDDVWNEDREKWLPLEELLMLGQGGSKVVVTARSEKTANVIGKRHFYTLECLSPDYSWSLFEMSAFQKGHEQENHHELVDIGKKIVEKCYNNPLAITVVGSLLYGEEISKWRSFEMSELAKIGNGDNKILPILKLSYHNLIPSLKSCFSYCAVFPKDHEIKKEMLIDLWIAQGYVVALDGGQSIEDAAEEHFVILLRRCFFQDVKKDEYGDVDSVKIHDLMHDVAQEVGREEICVVNDNTKNLGDKIRHVHGDVNRYAQRVSLCSHSHKIRSYIGGDCEKRCVDTLIDKWMCLRMLDLSWSDVKNLPNSIGKLLHLRYLNLSDNRNLKILPDAITRLHNLQTLLLEDCRSLKELPKDFCKLVKLRHLELQGCHDLIGMPFGMDKLTSLRILPNIVVGRKEQSDDELKALKGLTEIKGSISIRIYSKYRIVEGMNDTGGAAYLKSMKHLREIDITFLGECVGPEAVLETLEPPSNIKSLYIYNYSGTTIPVWGRAEINWAISLSHLVDIQLSCCSNLQEMPVLSKLPHLKSLKLGWLDNLEYMESSSSSDTEAATPELPTFFPSLEKLTLQHLEKLKGFGNRRSSSFPRLSELEIKKCPDLTSFPSCPSLEKLELKESNEALQIIVKITTRGKEKEENNNAGVRNSQDDDKVKLRKMVIDNLGYLTGVDIRFDDREGGFVNPEAVLATLEPPSNIKSLSIHRFDGKTLPVWGRAEINWAISLSHLVDIQLWHCRNLQEMPVLSKLPHLKSLELYNLISLEYMESTSRSSSSDTEAATPELPTFFPSLEKLRLWYLEKLKGLGNRRPSSFPRLSELEIWECPDLTWFPPCPSLKTLKLEKNNEALQIIVKITTTRGKEEKEEDKNAGVGNSQDDDNVKLRKVEIDNVSYLKSLPTNCLTHLKITGIDYREGEIESDSVEEEIELEVGEAFQKCASSLRSLIIIGNHGINKVMRLSGRTGLEHFTLLDSLKFSKIEDQEDEGEDNIIFWKSFPQNLRSLRIKDSDKMTSLPMGMQYLTSLQTLELSYCDELNSLPEWISSLSSLQYLRIYYCPALKSLPEAMRNLTSLQTLGISDCPDLVKRCRKPNGKDYPKIQHIPKIVLNEYW

SEQ ID NO: 81 - protein, 1392 aa, Spinacia oleracea
MAEIGYSVCAKLIEVIGSELIKEICDTWGYKSLLEDLNKTVLTVRNVLIQAGVMRELTSEQQGFIADLKDVVYDADDLFDKLLTRAERKQIDGNEISEKVRRFFSSSNKIGQAYYMSRKVKEIKKQLDEIVDRHTKFGFSAEFIPVCRERGNERETRSYIDVKNILGRDKDKNDIIDRLLNRNGNEACSFLTIVGAGGLGKTALAQLVFNDERVKIEFHDLRYWVCVSDQDGGQFDVKEILCKILEVVTKEKVDNSSTLELVQSQFQEKLRGKKYFLVLDDVWNEDREKWLPLEELLMLGQGGSKVVVTARSEKTANVIGKRHFYTLECLSPDYSWSLFEMSAFQKGHEQENHHELVDIGKKIVEKCYNNPLAITVVGSLLYGEEISKWRSFEMSELAKIGNGDNKILPILKLSYHNLIPSLKSCFSYCAVFPKDHEIKKEMLIDLWIAQGYVVALDGGQSIEDAAEEHFVILLRRCFFQDVKKDEYGDVDSVKIHDLMHDVAQEVGREEICVVNDNTKNLGDKIRHVHGDVNRYAQRVSLCSHSHKIRSYIGGDCEKRCVDTLIDKWMCLRMLDLSWSDVKNLPNSIGKLLHLRYLNLSDNRNLKILPDAITRLHNLQTLLLEDCRSLKELPKDFCKLVKLRHLELQGCHDLIGMPFGMDKLTSLRILPNIVVGRKEQSDDELKALKGLTEIKGSISIRIYSKYRIVEGMNDTGGAAYLKSMKHLREIDITFLGECVGPEAVLETLEPPSNIKSLYIYNYSGTTIPVWGRAEINWAISLSHLVDIQLSCCSNLQEMPVLSKLPHLKSLKLGWLDNLEYMESSSSSDTEAATPELPTFFPSLEKLTLQHLEKLKGFGNRRSSSFPRLSELEIKKCPDLTSFPSCPSLEKLELKESNEALQIIVKITTRGKEKEENNNAGVRNSQDDDKVKLRKMVIDNLGYLTGVDIRFDDREGGFVNPEAVLATLEPPSNIKSLSIHRFDGKTLPVWGRAEINWAISLSHLVDIQLWHCRNLQEMPVLSKLPHLKSLELYNLISLEYMESTSRSSSSDTEAATPELPTFFPSLEKLRLWYLEKLKGLGNRRPSSFPRLSELEIWECPDLTWFPPCPSLKTLKLEKNNEALQIIVKITTTRGKEEKEEDKNAGVGNSQDDDNVKLRKVEIDNVSYLKSLPTNCLTHLKITGIDYREGEIESDSVEEEIELEVGEAFQKCASSLRSLIIIGNHGINKVMRLSGRTGLEHFTLLDSLKFSKIEDQEDEGEDNIIFWKSFPQNLRSLRIKDSDKMTSLPMGMQYLTSLQTLELSYCDELNSLPEWISSLSSLQYLRIYYCPALKSLPEAMRNLTSLQTLGISDCPDLVKRCRKPNGKDYPKIQHIPKILLNTSLILNAPNLQDMD

SEQ ID NO: 82 - DNA, 6953 bp, Spinacia oleracea
atggccgaaatcggatactcggtttgtgcgaaactcatcgaagtgattggcagtgagctgatcaaagagatttgtgacacatggggttacaaatctcttcttgaggacctcaacaaaactgtattgacggtcaggaacgttctcattcaagccggggtgatgcgggagcttactagtgaacaacaaggtttcattgcagaccttaaagatgttgtttatgatgctgatgacttgttcgacaagttactcactcgtgctgagcgaaaacagattgatggaaacgaaatctctgaaaaggtacgtcgtttcttttcctctagtaacaagatcggtcaagcttactacatgtctcgtaaggttaaggaaattaagaagcagttggatgaaattgttgataggcatacaaaatttgggtttagtgccgagtttatacctgtttgtagggaaagggggaacgagagggaaacacgttcatatatagatgtcaagaatattcttgggagggataaagataagaatgatatcatagataggttgcttaatcgtaatggtaatgaagcttgtagtttcctgaccatagtgggagcgggaggattgggaaaaactgctcttgcacaacttgtgttcaatgatgaaagggtcaaaattgagttccatgatttgaggtattgggtttgtgtctctgatcaagatgggggccaatttgatgtgaaagaaatcctttgtaagattttagaggtggttactaaggagaaagttgataatagttccacattggaattggtacaaagccaatttcaagagaagttaagaggaaagaagtacttccttgttcttgatgatgtatggaacgaagatcgtgagaagtggcttcctttggaagagttgttaatgttgggtcaagggggaagcaaggttgtagtgaccgcacgttcagagaagacagcaaatgtcatagggaaaagacatttttatacactggaatgtttgtcaccagattattcatggagcttatttgaaatgtcggcttttcagaaagggcatgagcaggaaaaccatcacgaactagttgatattgggaaaaagattgttgaaaaatgttataacaatccacttgctataacggtggtaggaagtcttctttatggagaggagataagtaagtggcggtcatttgaaatgagtgagttggccaaaattggcaatggggataataagattttgccgatattaaagctcagttaccataatcttataccctcgttgaagagttgcttcagttattgtgcagtgtttcccaaggatcatgaaataaagaaggagatgttgattgatctttggatagcacaaggatacgttgtggcacttgatggaggtcaaagtatagaagatgctgccgaagaacattttgtaattttgttacggagatgtttctttcaagatgtaaagaaggatgaatatggtgatgttgattctgttaaaatccacgacttgatgcacgatgtcgcccaagaagtggggagggaggaaatatgtgtagtgaatgataatacaaagaacttgggtgataaaatccgtcatgtacatcgtgatgtcattagatatgcacaaagagtctctctgtgtagccatagccataagattcgttcgtatattggtggtaattgtgaaaaacgttgtgtggatacactaatagacaagtggatgtgtcttaggatgttggacttgtcatggtcggatgttaaaaatttgcctaattcaataggtaaattgttgcacttgaggtgtcttaacctgtcttataataaagatctgttgatactccctgatgcaattacaagactgcataatttgcagacactgcttttaaaagagtgcagaagtttaaaggagttgccaaaagatttttgcaaattggtcaaactgaggcacttggatttaaggtgttctgatttgaaggagttgccaaaagatttttgcaaattggtcaaactgaggcacttggatttaaggtgttctgatttgaaggagttgccaaaagatttttgcaaattggtcaaactgaggcacttggatttatggggttgtgatgatttgattggtgtgccattgggaatggataggctaattagtcttagagtactgccattctttgtggtgggtaggaaggaacaaagtgatgatgatgagctgaaagccctaaaaggcctcaccgagataaaaggctccattcgtattagaatctattcaaagtatagaatagttgaaggcatgaatgacacaggaggagctgggtatttaaagagcatgaaacatctcacgggggttgatattacatttgatggtggatgtgttaaccctgaagctgtgttggcaaccctagagccaccttcaaatatcaagaggttagagatgtggcattacagtggtacaacaattccagtatggggaagagcagagattaattgggcaatctccctctcacatcttgtcgacatccagctttggtgttgtagtaatttgcaggagatgccagtgctgagtaaactgcctcatttgaaatcactgtatctttttaagttttgtaagttagagtacatggagagtagaagcagcagcagtagcagtgacacagaagcagcaacaccagaattaccaacattcttcccttcccttgaaaaacttagactttggtatctggaaaagttgaagggtttggggaacaggagaccgagtagttttccccgcctctctgaattggaaatctgggaatgcccagatctaacgtggtttcctccctgtccaagccttgaaaaacttacactttggcgtctggacaagttgaagggtttggggaacaggagatcgagtagttttccccgcctctctaaattggtaatctggaaatgcccagatctaacgtggtttcctccctgtccaagccttgaaaaacttacactttggcgtctggacaagttgaagggtttggggaacaggagatcgagtagttttccccgcctctctgaattggaaatcaagaaatgcccagatctaacgtggtttcctccttgtccaagccttgaaacgttgaaattggaaaaaaacaatgaagcgttgcaaataatagtaaaaataacaacaacaagaggtaaagaagaaaaagaagaagacaagaatgctggtgttggaaattcacaagatgatgacaatgtcaaattatggacggtggaaatagacaatctgggttatctcaaatcactgcccacaaattgtcttactcacctcaaaataactggaatagattacagggagggggagattgaatcagattccgtggaggaggagattgaattggaagttggggaggcatttcagaagtgtgcatcttctttgagaagcctcatcataatcggaaatcacggaataaataaagtgatgagactgtctggaagaacagggttggagcatttcactctgttggactcactcaaactttcaaatatagaagaccaggaagatgagggcgaagacaacatcatattctggaaatcctttcctcaaaaccttcgcagtttgagaattaaagactctgacaaaatgacaagtttgcccatggggatgcagtacttaacctccctccaaaccctcgaactatcatattgtgatgaattgaattcccttccagaatggataagcagcttatcatctcttcaatacctgcgcatatacaactgtccagccctgaaatcactaccagaagcaatgcggaacctcacctcccttcagacacttgggatatcggattgtccagacctagttaaaatatgcagaaaacccaacggcgaggactatcccaaaattcaacacatccccggcattgtaagtgattgcagaaagtattttattcatttatatttattttatgcttagaatgatatacgccgtcgtccttaggtttccaatcttgaatttggtttttgttttctttctttgtttctttattcaacaccagcccatttatgattgattcattaaaaaaaggaagaagacaacgaattgagattcctggggtttttttttcgttggggttggttttcatgtatatgttgctgattaaatacgagactgatgatgattatgtgtttatgggttttaaatcagattaaatatatggaaaatgtaagttagttggggatgcacataaggtgtttgatgaaatgtcttttagaaatgttgtttcttggacttagaatgatatacactgtcgtcctttggtttccaatcttacatttggtttgtgttttcttagtttgtttctttaatcaacaccaacccattttttttaaactacctgcaactactaatttacgtttaccctttatctcaggtactaaatgaatattggtgattttcagttactcaacactagcttgatcctgaacgcacccaaccttcaggttagaatccggcttactcatccttttgtccagttttcaagtaattgttttggcaggatcaattctctaattgttgtacaccgtatattgcaatttatagtgactacagttaatgaatgtttacaaaaaattagtcatgtaaaaacttcttctctgtccattacataaactctttttctctttctaacttatcatgttcatgtctaaaaaattaaacatgctcacatcaatgttcatttaagctaacttacttctgtaagagagcgagctagttaaaaactcctttaactttctgttttatactcaggagtcaggaaggatatggattgatgcagctttcacaggccaagtaatataatgttctttatcaatcactcaatacctggagattgtttgaacacataattcacctctttttttccatctcaaattgcagccttttactgggatttgaatgacagcaaacatttgattgtcacgaggattgatctaactggtgaatgttgtgatcaccatattggtctttctcattcaaacaaacttgcataccgttcttttgaagtttgaagacaagcaggcgataatcaactcaggtcgaagctcatgtgcaggagagaatagaatatagaggagattatttttaaaagaaacgctcaaaggtattgtagcacctttcctatttgctactgcagtgatgtttttatttcttgtttgcagcgcttgtttctcatatttcaacctacttttagaaaaaaaaacatctccgaacataaccaaaaataaagttcccttatcagtgctttccctgctttcttctgaacaacatatacaattataaaccctttttctctcttacctttgttattcttccttgcttcattgagataacactctcctgtttttgttttgttgttagtcattacatggatatatcaaggacaacagttctgtagtccgtcaactgtggttaggaaggctaaactggagcacaataaccccatgtcaattgaatagtaaaggtgtgctatatcagtttcgtttggcttggcttgtttacctgaaaaatggctggttatttatccttgtctctttctatgacgtgcagtggcttgttaatgtgtctcggacaacaattcctcactttccaagttccatacacgctgatgtaactatcttctgcagtctgttctttcatttttgccacgtgctctaattataactttttgtactcaataatcaactccttgtcccggtatttgcagagactacttaaacaggtaaagtgacaatcctggcgaagttgtctgtttcttagctctgatcccatcattcaggtaagattaagtagttaagaagaaacatttatttttacctaatttgaatgaacttgtgtaactgcttgcttcctgcattaaataagaaatttctgctgcatatgtgacagttacatccacaaaaaagttggaggtttgttcagggattggaaatgaaggtacttcagaatttgtttatgaatgctccagacttcagagtctttaatggaaaattcgagtcactaaaaatacattattcctatcatcagagctttcaagttcctctatacaaggtcaactgagttcctctttgcctcttgtttaattgtatttacttgtaccttaattataatctgtatattgttttagttaagttctaaaacaggttactattcatcatttgtgcagcatattgctggaatcaagaatctagtgcttcttcttcctgacttcactgtcaaaatagcagttcccatgctggaaataagcgcgctagcaatgtaattgatgacatggatgttgctgcttctgagttttgatcataaaaagctgttatgtgtttcttgaatgtaatgtagaagaggagaaaactgaaaactcttggcaaaaacgtgaaattgcagtgcctcggggtgggagggatcacccggattcagttcagacgatacttttttcaacccggtttgttccggttttcagcttcaggttttccttgtacttttgggggacacagacaaggctacttcatgtttgagaaacctaattgaggctatcttgtagcaaatgcacaccacactctttctctcttctctccttttttcaccttccatttgtaaaaatcctcctttaaaggttaataaaaaaaaagctccaagtctcgtagggtggatgtaggtcacattgaccgaaccacggtaaactctttgtgttctttcttctctctttgtttctcatttttacggcaagtgtttatggttaaccatgcatcttagaatagcttaaggcattaacataataacatcaatgttctccaaagattcaccttacttgttgtacataatcacaatgttaagcctatgaaggtagaatgctctcatgatttggtttaaccaaaaaataaactctaaaataatacggagtaataaaaattggccataaactaattacaaagtttgatttttgt

SEQ ID NO: 83 - DNA, 2000 bp, Spinacia oleracea; identical to SEQ ID NO: 13

SEQ ID NO: 84 - DNA, 3900 bp, Spinacia oleracea
atggccgaaatcggatactcggtttgtgcgaaactcatcgaagtgattggcagtgagctgatcaaagagatttgtgacacatggggttacaaatctcttcttgaggacctcaacaaaactgtattgacggtcaggaacgttctcattcaagccggggtgatgcgggagcttactagtgaacaacaaggtttcattgcagaccttaaagatgttgtttatgatgctgatgacttgttcgacaagttactcactcgtgctgagcgaaaacagattgatggaaacgaaatctctgaaaaggtacgtcgtttcttttcctctagtaacaagatcggtcaagcttactacatgtctcgtaaggttaaggaaattaagaagcagttggatgaaattgttgataggcatacaaaatttgggtttagtgccgagtttatacctgtttgtagggaaagggggaacgagagggaaacacgttcatatatagatgtcaagaatattcttgggagggataaagataagaatgatatcatagataggttgcttaatcgtaatggtaatgaagcttgtagtttcctgaccatagtgggagcgggaggattgggaaaaactgctcttgcacaacttgtgttcaatgatgaaagggtcaaaattgagttccatgatttgaggtattgggtttgtgtctctgatcaagatgggggccaatttgatgtgaaagaaatcctttgtaagattttagaggtggttactaaggagaaagttgataatagttccacattggaattggtacaaagccaatttcaagagaagttaagaggaaagaagtacttccttgttcttgatgatgtatggaacgaagatcgtgagaagtggcttcctttggaagagttgttaatgttgggtcaagggggaagcaaggttgtagtgaccgcacgttcagagaagacagcaaatgtcatagggaaaagacatttttatacactggaatgtttgtcaccagattattcatggagcttatttgaaatgtcggcttttcagaaagggcatgagcaggaaaaccatcacgaactagttgatattgggaaaaagattgttgaaaaatgttataacaatccacttgctataacggtggtaggaagtcttctttatggagaggagataagtaagtggcggtcatttgaaatgagtgagttggccaaaattggcaatggggataataagattttgccgatattaaagctcagttaccataatcttataccctcgttgaagagttgcttcagttattgtgcagtgtttcccaaggatcatgaaataaagaaggagatgttgattgatctttggatagcacaaggatacgttgtggcacttgatggaggtcaaagtatagaagatgctgccgaagaacattttgtaattttgttacggagatgtttctttcaagatgtaaagaaggatgaatatggtgatgttgattctgttaaaatccacgacttgatgcacgatgtcgcccaagaagtggggagggaggaaatatgtgtagtgaatgataatacaaagaacttgggtgataaaatccgtcatgtacatcgtgatgtcattagatatgcacaaagagtctctctgtgtagccatagccataagattcgttcgtatattggtggtaattgtgaaaaacgttgtgtggatacactaatagacaagtggatgtgtcttaggatgttggacttgtcatggtcggatgttaaaaatttgcctaattcaataggtaaattgttgcacttgaggtgtcttaacctgtcttataataaagatctgttgatactccctgatgcaattacaagactgcataatttgcagacactgcttttaaaagagtgcagaagtttaaaggagttgccaaaagatttttgcaaattggtcaaactgaggcacttggatttaaggtgttctgatttgaaggagttgccaaaagatttttgcaaattggtcaaactgaggcacttggatttaaggtgttctgatttgaaggagttgccaaaagatttttgcaaattggtcaaactgaggcacttggatttatggggttgtgatgatttgattggtgtgccattgggaatggataggctaattagtcttagagtactgccattctttgtggtgggtaggaaggaacaaagtgatgatgatgagctgaaagccctaaaaggcctcaccgagataaaaggctccattcgtattagaatctattcaaagtatagaatagttgaaggcatgaatgacacaggaggagctgggtatttaaagagcatgaaacatctcacgggggttgatattacatttgatggtggatgtgttaaccctgaagctgtgttggcaaccctagagccaccttcaaatatcaagaggttagagatgtggcattacagtggtacaacaattccagtatggggaagagcagagattaattgggcaatctccctctcacatcttgtcgacatccagctttggtgttgtagtaatttgcaggagatgccagtgctgagtaaactgcctcatttgaaatcactgtatctttttaagttttgtaagttagagtacatggagagtagaagcagcagcagtagcagtgacacagaagcagcaacaccagaattaccaacattcttcccttcccttgaaaaacttagactttggtatctggaaaagttgaagggtttggggaacaggagaccgagtagttttccccgcctctctgaattggaaatctgggaatgcccagatctaacgtggtttcctccctgtccaagccttgaaaaacttacactttggcgtctggacaagttgaagggtttggggaacaggagatcgagtagttttccccgcctctctaaattggtaatctggaaatgcccagatctaacgtggtttcctccctgtccaagccttgaaaaacttacactttggcgtctggacaagttgaagggtttggggaacaggagatcgagtagttttccccgcctctctgaattggaaatcaagaaatgcccagatctaacgtggtttcctccttgtccaagccttgaaacgttgaaattggaaaaaaacaatgaagcgttgcaaataatagtaaaaataacaacaacaagaggtaaagaagaaaaagaagaagacaagaatgctggtgttggaaattcacaagatgatgacaatgtcaaattatggacggtggaaatagacaatctgggttatctcaaatcactgcccacaaattgtcttactcacctcaaaataactggaatagattacagggagggggagattgaatcagattccgtggaggaggagattgaattggaagttggggaggcatttcagaagtgtgcatcttctttgagaagcctcatcataatcggaaatcacggaataaataaagtgatgagactgtctggaagaacagggttggagcatttcactctgttggactcactcaaactttcaaatatagaagaccaggaagatgagggcgaagacaacatcatattctggaaatcctttcctcaaaaccttcgcagtttgagaattaaagactctgacaaaatgacaagtttgcccatggggatgcagtacttaacctccctccaaaccctcgaactatcatattgtgatgaattgaattcccttccagaatggataagcagcttatcatctcttcaatacctgcgcatatacaactgtccagccctgaaatcactaccagaagcaatgcggaacctcacctcccttcagacacttgggatatcggattgtccagacctagttaaaatatgcagaaaacccaacggcgaggactatcccaaaattcaacacatccccggcattgtactaaatgaatattggtga

SEQ ID NO: 85 - protein, 1299 aa, Spinacia oleracea
MAEIGYSVCAKLIEVIGSELIKEICDTWGYKSLLEDLNKTVLTVRNVLIQAGVMRELTSEQQGFIADLKDVVYDADDLFDKLLTRAERKQIDGNEISEKVRRFFSSSNKIGQAYYMSRKVKEIKKQLDEIVDRHTKFGFSAEFIPVCRERGNERETRSYIDVKNILGRDKDKNDIIDRLLNRNGNEACSFLTIVGAGGLGKTALAQLVFNDERVKIEFHDLRYWVCVSDQDGGQFDVKEILCKILEVVTKEKVDNSSTLELVQSQFQEKLRGKKYFLVLDDVWNEDREKWLPLEELLMLGQGGSKVVVTARSEKTANVIGKRHFYTLECLSPDYSWSLFEMSAFQKGHEQENHHELVDIGKKIVEKCYNNPLAITVVGSLLYGEEISKWRSFEMSELAKIGNGDNKILPILKLSYHNLIPSLKSCFSYCAVFPKDHEIKKEMLIDLWIAQGYVVALDGGQSIEDAAEEHFVILLRRCFFQDVKKDEYGDVDSVKIHDLMHDVAQEVGREEICVVNDNTKNLGDKIRHVHRDVIRYAQRVSLCSHSHKIRSYIGGNCEKRCVDTLIDKWMCLRMLDLSWSDVKNLPNSIGKLLHLRCLNLSYNKDLLILPDAITRLHNLQTLLLKECRSLKELPKDFCKLVKLRHLDLRCSDLKELPKDFCKLVKLRHLDLRCSDLKELPKDFCKLVKLRHLDLWGCDDLIGVPLGMDRLISLRVLPFFVVGRKEQSDDDELKALKGLTEIKGSIRIRIYSKYRIVEGMNDTGGAGYLKSMKHLTGVDITFDGGCVNPEAVLATLEPPSNIKRLEMWHYSGTTIPVWGRAEINWAISLSHLVDIQLWCCSNLQEMPVLSKLPHLKSLYLFKFCKLEYMESRSSSSSSDTEAATPELPTFFPSLEKLRLWYLEKLKGLGNRRPSSFPRLSELEIWECPDLTWFPPCPSLEKLTLWRLDKLKGLGNRRSSSFPRLSKLVIWKCPDLTWFPPCPSLEKLTLWRLDKLKGLGNRRSSSFPRLSELEIKKCPDLTWFPPCPSLETLKLEKNNEALQIIVKITTTRGKEEKEEDKNAGVGNSQDDDNVKLWTVEIDNLGYLKSLPTNCLTHLKITGIDYREGEIESDSVEEEIELEVGEAFQKCASSLRSLIIIGNHGINKVMRLSGRTGLEHFTLLDSLKLSNIEDQEDEGEDNIIFWKSFPQNLRSLRIKDSDKMTSLPMGMQYLTSLQTLELSYCDELNSLPEWISSLSSLQYLRIYNCPALKSLPEAMRNLTSLQTLGISDCPDLVKICRKPNGEDYPKIQHIPGIVLNEYW

SEQ ID NO: 86 - DNA, 5768 bp, Spinacia oleracea
atggctgaaatcggatactcggtttgttcaaaacttattgaagtgatgggcagtaagatcattaaagagatttgcgacatgtggggttacaattctcatcttgacgacctcaacaaatctgtcttgacgatcaaggatgtgctcttggatgctgaggcgaagcgggatctttcccgtgaacaacagagttacattgcagaacttaaggatgttgtttacgatgctgatgatttgttcgatgagttcctcactcttgctgagctcaaacagattgatggcaacaacaagggtggtggtaaattctccaaaaaggtacgtcgtttcttttcttctaataaggagaagatgggtcaagcttacaagatgtctcatatggttaaagaaattaagaagcagttgggtgaaattgttgataggtataccaaatttgggtttattgttgattataaacctattattaggagaagggaggaaacatgttcttattttgtaggtgccaaggagattgttgggagggataaggataaagatgttatcataggcatgttgctagatcatgataacgattgtagtttcttggctgttgtgggggttggaggggtgggaaaaactactcttgcccaacttgtgtataatgatgaaagagtcaaaagtgagttccaagatttgaggtattgggtttgtgtctctgatcaagatgggggacaatttgatgacaaaagaattctttgtaagattatagagttagttacgggccagattcctccgagtaacgagagcatggaatcggtgcgtaagaaatttcaagaggaattaggaggaaagaagtacttccttgttcttgatgatgtatggaacgaggatcgccagaagtggcttcatctagaaaatttcttgaaattgggtcaagggggaagcaagattgtggtaaccacacgttcagagaagacggcaaatgttatagggaaaagacaagactataaactagaatgtttgtcagcagaggattcatggcgcttatttgaaatgtcagcttttgacgaagggcatggccaggaaaactatgacgaattagtgacgattggcaagaagattgttgaaaaatgttataacaatccacttgctataacagtggtaggaagccttctttttggacaagagataaataagtggcggtcgtttgaaagcagtggattagcccaaattgccaatggtgataatcagattttcccgatattaaagctcagttaccacaatcttccacactccttgaagagctgctttagctattgtgcagtgtttcccaaagattatgaaataaagaaggagatgttgattgatctttggatagcacaaggatacattataccgttggatggaggtcaaagtatagaagatgctgccgaggaacattttgtaattttgttaagaagatgtttctttcaagatgtaaagaaggattctcttggtaatgttgattatgttaaaatccacgacttaatgcacgatgtcgctcaagaagtggggaaggaggaaatctgtgtagtgacttcaggtacaaagaagttggctgataaaatccgtcacgtgggttgtgttgtcgatagagatccagaaatagtctttttatgtagcaataagattcgttcgtatattagcggtcgctgcataaagaatccggtggattcacaaatagacaactggatgtgccttagggtgttggacttgtcagattcatgtgttaaagatttgtctgattcaataggtaagctgctgcacttaaggtatcttaacctctcttctaatataaagttggagataatccctgatgcaattacaagactgcataacttgcagacactacttttagaagattgcagaagtttaaaggagttgccaaaagatttttgcaaattggtcaaactgaggcacttggaattacagggttgtcatgatttgattggtatgccatttggaatggataagctaactagtcttagaatactaccaaacattgtggtgggtaggaaggaacaaagtgatgatgagctgaaagccctaaaaggcctcaccgagataaaaggctccatttctatcagaatctattcaaagtatagaatagttgaaggcatgaatgacacaggaggagctgcttatttgaagagcatgaaacatctcagggagattgatattacatttttgggtgaatgtgttggccctgaagctgtattggaaaccttagagccaccttcaaatatcaagagcttatatatatataattacagtggtacaacaattccagtatggggaagagcagagattaattgggcaatctccctctcacatctcgtcgacatccagcttagttgttgtagtaatttgcaggagatgccagtgctgagtaaactgcctcatttgaaatcgctgaaacttggatggttggataacttagagtacatggagagtagcagtagcagtgacacagaagcagcaacaccagaattaccaacattcttcccttcccttgaaaaacttactttacagcatctggaaaagttgaagggttttgggaacaggagatcgagtagttttccccgcctctctgaattggaaatcaagaaatgcccagatctaacgtcatttccttcttgtccaagccttgagaagttggaattgaaagaaagcaatgaagcattgcaaataatagtaaaaataacaacaagaggtaaagaaaaagaagagaacaataatgctggtgttagaaattcacaagatgatgacaaagtcaaattacggaagatggtgatagacaatctgggttatctcaaatcactgcccacaaattgtcttactcaccttgaaattgaggagtttattgaatcagattccgaggaagagattgaatcagaagtcggggaggaggaggttgaattggaagttgtggaggcatttcagaagtctgcatcttctctgcaaagcctcgaaatatacagaataaataaactgaatagactaactggaacaacaggattagtgcatttcagtgccttggacgaactcacattgaattttgtcgacgattttgaagtatcctttcctcaaagcctccgcagtttgaaaattgaatactcttataaaatgacaagtctgcccatggggatgcagtacttaacctccctccaaaccctcgaactaaaatgttgtgatgaattgaattcccttccagaatggataagcaacttatcatctcttcaatccctgtccatatcctactgtgaagccctgaaatcactaccagaagcaatgcagaacctcacctcccttcagagacttgtgataagagaatgtcgagacctagctgaaagatgcgaagaacccaatggggaagactatcacaaaattcaacacatccccaaaattgtaagtgattgcggaaagtgtttcttttatttatttttaattttatgcttagaatgatatacatcagcattcagcgtccattggtttccaatcttacatttggtttttgttttcttagtttgtttctttaatcaacaccagcccattttttttaaactacctgcaactattaattttcatttaccctgtatctcaggaaatatggtagtattctcatttactcaacactagcttgatcctgaacgcagccaaccttcaggttagaatccgccttactcatccttttgtcatgcattgttttaagttgttttgcttgcttgtgtaatcataattcatagtatacgattcatcattcactatgtctacaggcaagatattggaattgttcacgattccctgaagtttctttgtttttgttgataccaccatattgcagcttatagtgactaagttaatgaatgtttccaaaaaattagtcatataaattcttcttctctctccattacataaactctttttctctttctaactatcatgttcatgtctaaaacttatacatgctcacatcattgttcgtttcagctgacttacttctgtaagagagctatctagttaacaactcttgtaacattttatttgctagtcagaacatggattggtgcaagcatgggaatatgctaacactctaccaaatcgattggagtttggacttagtttcaccagaagccatacccggacacttactggggactgtcaacaaagccgcattgtgatgtacttggatgtttcacgtgcctgaggtgcgagttacttggaagggaagcggtttatttaattgttttcccaagtagattttgcttacaagcttttacttttcacttgaaagggtttttcttgttttaagcttttcgaattagagttttcggttgcattaagagtagtcgtattagtcttttacctaaggaagactcttttttgtaattttcagactatgcaattcaagttttcgagtgttttcttgcttgtgtgattgtgagttggtgaattcgtctttcatacattttgagattatcagaagctttatgctccaccggtagtctagtaccttttctgttactgtgcagggaagtaatctggtaccttctatatatatggaaaaacatacattatacattatgcaaaattcttacaggttagttacttcctggaacttcatttacacttagttttttttgttccattccctcggaatcaagtcattccctctgagaaatatgtaatgaacttctgtatgttgctgtttggttcctgttttaatcttcaattttcttgtatagttacagctgcatttacaatgaagtttaagcagacactctctttatatagtgcctctttctggagcaccgtagagctgtctgtggttgatcaccatctgctgccgagagattcagcaatcgcgtgtttgatcaggtaaaagtttttatgtcaatgtgtttttttttccgtttgatcaatttatgtctgtattcagattcttatcttcttacagtagcataacacattgtttctttcatttatgtaaactgtttcaagattacagagatgtatgcttcagtcgacattgatgataacttaagatggcattcctacaacagttgcaggcgcattctaactccggcaattctagttaggcaagaggagcattgccaatacctgccacctctgggatttactataccagggttgaagtttatggaagacaccagctatgcacaagccttcaaggggtcatcctacataacaagttgaaccaaccaattgcttgttggttcagtggtaattggagctgaatttggtagggatggcccgtgttcgatccccacaacaacaattgggaggggactggaacctatccacacagaactcgccctgaatccggattagccctaagggtgaacggggtgctaacaccaaaaaaaaaaacataacaagttgaaccaaacatactttgtttgaattgaagatttagtgatttcatttgatcgattgagatgtcttattataagcgtatatgctcttggatttggccacttaggtgttgtttgacaattggtcattaactcgcttttatattttcttttctcttaggaaaggtgatcctgagaatttatattggaacactttttttttctcactagctttaaaaaagtgttctgtgttacctgcaattcaatttgattatttttcacatagttttacctgaaaaagtgttacctgaaaaagtgttacctgaaaatcaactgacataagtttttgtttggatccaattaaggacactagataaatcg

SEQ ID NO: 87 - DNA, 2001 bp, Spinacia oleracea
  unsure 245
attaaaaaaattaaaaaaataaataaattacttattccttctatttttacttgttacacttttctacaacagaaacatcaaaacgcccgcaacacactataaatgaaaaaccattttgtatgcaatgatatttacgttctcactttattctctttaataactcctactacgtaattctcaccaatcaaataaaattatagaaattttcatttataccctcttaaaatgatgttgatttttttttnaggtgtgaaaaagtttgtgttataagttacaacaatttaaaaacggagaacatacttataatactagtgtaatctttggccggattatggtcgttgacaaaaaaactccggccttgaccctccacgtgccggtcaagtgacttaataaaccttttattccacccttttttcattcttctttttattcttctttttctctccattaatacaaatcaagtgattatgtcgatccgatccttctgttctctactgtaattgattacaccaacaacaaccaagcgaaacagtcaatgttaccgaattgaattgcggaaaatagtttatgattgattcattaaaaaaggatggagttttgtggatttgaataagacaacgaattgagattcctggggttttctttctgttggggttggatttcatgtacttgttgatgatcaaatatgtgattgaagatgatgatgtgtttatgggtttgaaatcggattaaatttatgggaaatgtaagtgaattggggatgcacataaggtgtttgatgaaatgtctatgagaaatattgtttcttgcacttgtatgataatttgtggggatttgattagttcatggtgcgagtttgatgcaatgccgaagagaaatcaggtctttagagaaactcaaatggttgaataggcttccaacaatgttgtttcgtagtacactgccatgattgatagagaaggaagcagatgaaggagaaggctcatgtgaccggcacatgggtagtaagtcaacgccggaaatcgtggtcaacgtccaaaaccgagctaaggtaacatattggagtacaagtaattacaacaaaaagtgttacttccttgtacattattattttacttgaaatgctagttgtgtttgtgcatctgtggaactctaaattaattaattaaccatcaaccaaacaactttagtgtaaattggccaaccttttgccatcagccacagaaaagtgaaatatcaccccattattgcccattctgtatttgcattttttttaaggcatagcacagccggttttccggatcttagctccgtctacattcggatccgatccatttcgcacaccttgtttgtggtggatgagtctcccaacaagaatttctcgctcgaaactgagaacccccttaagcggcatcaagttgcttaccacttgagccaactctatgttggtttctgcatttgcagttagttaggtcgtctgagtgcgaaatgggaatgctttatcacacactccacagtttagtcaggctgatggaaacgtaataattgagttatttgagtgttcaaacttaaagtcagtcactcactcaaacactcaatactttctccatcttgttttctcattacatatgaaaacccaaacacctttcatttctgcttaatcttctttctctcatctttcagttattcacctgttcatctttctgaaaacaacccaaacacccttcatttctgcttaatcttcttttctcatcttcatccacctgtttatctttctgtaaacacaacccaaacacctttcatttctgatttatcttgttatctcatcttcattcacctgttcatctttctgaaaatctaaacacccttcatttctgctgatcttcttttctaatctccccctaaatcatctttctgaaaacccaaacacctttcttttctgcttttatcttgttttctcatcttaattcatctcttcatctttctgaaaaacccaaccca

SEQ ID NO: 88 - DNA, 3434 bp, Spinacia oleracea
atggctgaaatcggatactcggtttgttcaaaacttattgaagtgatgggcagtaagatcattaaagagatttgcgacatgtggggttacaattctcatcttgacgacctcaacaaatctgtcttgacgatcaaggatgtgctcttggatgctgaggcgaagcgggatctttcccgtgaacaacagagttacattgcagaacttaaggatgttgtttacgatgctgatgatttgttcgatgagttcctcactcttgctgagctcaaacagattgatggcaacaacaagggtggtggtaaattctccaaaaaggtacgtcgtttcttttcttctaataaggagaagatgggtcaagcttacaagatgtctcatatggttaaagaaattaagaagcagttgggtgaaattgttgataggtataccaaatttgggtttattgttgattataaacctattattaggagaagggaggaaacatgttcttattttgtaggtgccaaggagattgttgggagggataaggataaagatgttatcataggcatgttgctagatcatgataacgattgtagtttcttggctgttgtgggggttggaggggtgggaaaaactactcttgcccaacttgtgtataatgatgaaagagtcaaaagtgagttccaagatttgaggtattgggtttgtgtctctgatcaagatgggggacaatttgatgacaaaagaattctttgtaagattatagagttagttacgggccagattcctccgagtaacgagagcatggaatcggtgcgtaagaaatttcaagaggaattaggaggaaagaagtacttccttgttcttgatgatgtatggaacgaggatcgccagaagtggcttcatctagaaaatttcttgaaattgggtcaagggggaagcaagattgtggtaaccacacgttcagagaagacggcaaatgttatagggaaaagacaagactataaactagaatgtttgtcagcagaggattcatggcgcttatttgaaatgtcagcttttgacgaagggcatggccaggaaaactatgacgaattagtgacgattggcaagaagattgttgaaaaatgttataacaatccacttgctataacagtggtaggaagccttctttttggacaagagataaataagtggcggtcgtttgaaagcagtggattagcccaaattgccaatggtgataatcagattttcccgatattaaagctcagttaccacaatcttccacactccttgaagagctgctttagctattgtgcagtgtttcccaaagattatgaaataaagaaggagatgttgattgatctttggatagcacaaggatacattataccgttggatggaggtcaaagtatagaagatgctgccgaggaacattttgtaattttgttaagaagatgtttctttcaagatgtaaagaaggattctcttggtaatgttgattatgttaaaatccacgacttaatgcacgatgtcgctcaagaagtggggaaggaggaaatctgtgtagtgacttcaggtacaaagaagttggctgataaaatccgtcacgtgggttgtgttgtcgatagagatccagaaatagtctttttatgtagcaataagattcgttcgtatattagcggtcgctgcataaagaatccggtggattcacaaatagacaactggatgtgccttagggtgttggacttgtcagattcatgtgttaaagatttgtctgattcaataggtaagctgctgcacttaaggtatcttaacctctcttctaatataaagttggagataatccctgatgcaattacaagactgcataacttgcagacactacttttagaagattgcagaagtttaaaggagttgccaaaagatttttgcaaattggtcaaactgaggcacttggaattacagggttgtcatgatttgattggtatgccatttggaatggataagctaactagtcttagaatactaccaaacattgtggtgggtaggaaggaacaaagtgatgatgagctgaaagccctaaaaggcctcaccgagataaaaggctccatttctatcagaatctattcaaagtatagaatagttgaaggcatgaatgacacaggaggagctgcttatttgaagagcatgaaacatctcagggagattgatattacatttttgggtgaatgtgttggccctgaagctgtattggaaaccttagagccaccttcaaatatcaagagcttatatatatataattacagtggtacaacaattccagtatggggaagagcagagattaattgggcaatctccctctcacatctcgtcgacatccagcttagttgttgtagtaatttgcaggagatgccagtgctgagtaaactgcctcatttgaaatcgctgaaacttggatggttggataacttagagtacatggagagtagcagtagcagtgacacagaagcagcaacaccagaattaccaacattcttcccttcccttgaaaaacttactttacagcatctggaaaagttgaagggttttgggaacaggagatcgagtagttttccccgcctctctgaattggaaatcaagaaatgcccagatctaacgtcatttccttcttgtccaagccttgagaagttggaattgaaagaaagcaatgaagcattgcaaataatagtaaaaataacaacaagaggtaaagaaaaagaagagaacaataatgctggtgttagaaattcacaagatgatgacaaagtcaaattacggaagatggtgatagacaatctgggttatctcaaatcactgcccacaaattgtcttactcaccttgaaattgaggagtttattgaatcagattccgaggaagagattgaatcagaagtcggggaggaggaggttgaattggaagttgtggaggcatttcagaagtctgcatcttctctgcaaagcctcgaaatatacagaataaataaactgaatagactaactggaacaacaggattagtgcatttcagtgccttggacgaactcacattgaattttgtcgacgattttgaagtatcctttcctcaaagcctccgcagtttgaaaattgaatactcttataaaatgacaagtctgcccatggggatgcagtacttaacctccctccaaaccctcgaactaaaatgttgtgatgaattgaattcccttccagaatggataagcaacttatcatctcttcaatccctgtccatatcctactgtgaagccctgaaatcactaccagaagcaatgcagaacctcacctcccttcagagacttgtgataagagaatgtcgagacctagctgaaagatgcgaagaacccaatggggaagactatcacaaaattcaacacatccccaaaattgaaatatggtagta

SEQ ID NO: 89 - protein, 1143 aa, Spinacia oleracea
MAEIGYSVCSKLIEVMGSKIIKEICDMWGYNSHLDDLNKSVLTIKDVLLDAEAKRDLSREQQSYIAELKDVVYDADDLFDEFLTLAELKQIDGNNKGGGKFSKKVRRFFSSNKEKMGQAYKMSHMVKEIKKQLGEIVDRYTKFGFIVDYKPIIRRREETCSYFVGAKEIVGRDKDKDVIIGMLLDHDNDCSFLAVVGVGGVGKTTLAQLVYNDERVKSEFQDLRYWVCVSDQDGGQFDDKRILCKIIELVTGQIPPSNESMESVRKKFQEELGGKKYFLVLDDVWNEDRQKWLHLENFLKLGQGGSKIVVTTRSEKTANVIGKRQDYKLECLSAEDSWRLFEMSAFDEGHGQENYDELVTIGKKIVEKCYNNPLAITVVGSLLFGQEINKWRSFESSGLAQIANGDNQIFPILKLSYHNLPHSLKSCFSYCAVFPKDYEIKKEMLIDLWIAQGYIIPLDGGQSIEDAAEEHFVILLRRCFFQDVKKDSLGNVDYVKIHDLMHDVAQEVGKEEICVVTSGTKKLADKIRHVGCVVDRDPEIVFLCSNKIRSYISGRCIKNPVDSQIDNWMCLRVLDLSDSCVKDLSDSIGKLLHLRYLNLSSNIKLEIIPDAITRLHNLQTLLLEDCRSLKELPKDFCKLVKLRHLELQGCHDLIGMPFGMDKLTSLRILPNIVVGRKEQSDDELKALKGLTEIKGSISIRIYSKYRIVEGMNDTGGAAYLKSMKHLREIDITFLGECVGPEAVLETLEPPSNIKSLYIYNYSGTTIPVWGRAEINWAISLSHLVDIQLSCCSNLQEMPVLSKLPHLKSLKLGWLDNLEYMESSSSSDTEAATPELPTFFPSLEKLTLQHLEKLKGFGNRRSSSFPRLSELEIKKCPDLTSFPSCPSLEKLELKESNEALQIIVKITTRGKEKEENNNAGVRNSQDDDKVKLRKMVIDNLGYLKSLPTNCLTHLEIEEFIESDSEEEIESEVGEEEVELEVVEAFQKSASSLQSLEIYRINKLNRLTGTTGLVHFSALDELTLNFVDDFEVSFPQSLRSLKIEYSYKMTSLPMGMQYLTSLQTLELKCCDELNSLPEWISNLSSLQSLSISYCEALKSLPEAMQNLTSLQRLVIRECRDLAERCEEPNGEDYHKIQHIPKIEIW

SEQ ID NO: 90 - DNA, 8415 bp, Spinacia oleracea
atggccgaaatcggatactcggtttgtgcgaaactcatcgaagtgattggcagtgagctgatcaaagagatttgtgacacatggggttacaaatctcttcttgaggacctcaacaaaactgtattgacggtcaggaacgttctcattcaagccggggtgatgcgggagcttactagtgaacaacaaggtttcattgcagaccttaaagatgttgtttatgatgctgatgacttgttcgacaagttactcactcgtgctgagcgaaaacagattgatggaaacgaaatctctgaaaaggtacgtcgtttcttttcctctagtaacaagatcggtcaagcttactacatgtctcgtaaggttaaggaaattaagaagcagttggatgaaattgttgataggcatacaaaatttgggtttagtgccgagtttatacctgtttgtagggaaagggggaacgagagggaaacacgttcatatatagatgtcaagaatattcttgggagggataaagataagaatgatatcatagataggttgcttaatcgtaatggtaatgaagcttgtagtttcctgaccatagtgggagcgggaggattgggaaaaactgctcttgcacaacttgtgttcaatgatgaaagggtcaaaattgagttccatgatttgaggtattgggtttgtgtctctgatcaagatgggggccaatttgatgtgaaagaaatcctttgtaagattttagaggtggttactaaggagaaagttgataatagttccacattggaattggtacaaagccaatttcaagagaagttaagaggaaagaagtacttccttgttcttgatgatgtatggaacgaagatcgtgagaagtggcttcctttggaagagttgttaatgttgggtcaagggggaagcaaggttgtagtgaccgcacgttcagagaagacagcaaatgtcatagggaaaagacatttttatacactggaatgtttgtcaccagattattcatggagcttatttgaaatgtcggcttttcagaaagggcatgagcaggaaaaccatcacgaactagttgatattgggaaaaagattgttgaaaaatgttataacaatccacttgctataacggtggtaggaagtcttctttatggagaggagataagtaagtggcggtcatttgaaatgagtgagttggccaaaattggcaatggggataataagattttgccgatattaaagctcagttaccataatcttataccctcgttgaagagttgcttcagttattgtgcagtgtttcccaaggatcatgaaataaagaaggagatgttgattgatctttggatagcacaaggatacgttgtggcacttgatggaggtcaaagtatagaagatgctgccgaagaacattttgtaattttgttacggagatgtttctttcaagatgtaaagaaggatgaatatggtgatgttgattctgttaaaatccacgacttgatgcacgatgtcgcccaagaagtggggagggaggaaatatgtgtagtgaatgataatacaaagaacttgggtgataaaatccgtcatgtacatggtgatgtcaatagatatgcacaaagagtctctctgtgtagccatagccataagattcgttcgtatattggtggtgattgtgaaaaacgttgtgtggatacactaatagacaagtggatgtgtcttaggatgttggacttgtcatggtcggatgttaaaaatttgcctaattcaataggtaaattgttgcacttgaggtatcttaacctgtcagataatagaaatctaaagatacttcctgatgcaattacaagactgcataatttgcagacactgcttttagaagattgcagaagtttaaaggagttgccaaaagatttttgcaaattggtcaaactgagacacttggatttatggggttgtgatgatttgattggtatgccatttggaatggataagctaactagtcttagaatactaccaaacattgtggtgggtaggaaggaacaaagtgttgatgatgagctgaaagcccttaaaggcctcaccgagataaaaggcgacattgatatcaaaatctgtgaaaattatagaatagttgaaggcatgaatgacacaggaggagctgggtatttgaagagcatgaaacatctcagggagattggtattacatttgatggtggatgtgttaaccctgaagctgtgttggcaaccctagagccaccttcaaatatcaagagcttatctatagataattacgatggtacaacaattccagtatggggaagagcagagattaattgggcaatctccctctcacatcttgtcgacatcacgcttgaagattgttacaatttgcaggagatgccagtgctgagtaaactgcctcatttgaaatcactgtatctttttaagttttgtaagttagagtacatggagagtagaagcagcagcagtagcagtgacacagaagcagcaacaccagaattaccaacattcttcccttcccttgaaaaacttagactttggtatctggaaaagttgaagggtttggggaacaggagaccgagtagttttccccgcctctctgaattggaaatctgggaatgcccagatctaacgtggtttcctccttgtccaagccttaaaacgttgaaattggaaaaaaacaatgaagcgttgcaaataatagtaaaaataacaacaacaagaggtaaagaagaaaaagaagaagacaagaatgctggtgttggaaattcacaagatgatgacaatgtcaaattacggaaggtggaaatagacaatgtgagttatctcaaatcactgcccacaaattgtcttactcacctcaaaataactggaatagattacagggagggggagattgaatcagattccgtggaggaggagattgaattggaagttggggaggcatttcagaagtgtgcatcttctttgagaagcctcatcataatcggaaatcacggaataaataaagtgatgagactgtctggaagaacagggttggagcatttcactctgttggactcactcaaattttcaaagatagaagaccaggaagatgagggcgaagacaacatcatattctggaaatcctttcctcaaaacctccgcagtttggaaattaaaggctcttgcaaaatgacaagtttgcccatggggatgcagtacttaacctccctccaaaccctcgaactatcatattgtgatgaattgaattcccttccagaatggataagcagcttatcatctcttcaatacctgcgcatatacaactgtccagccctgaaatcactaccagaagcaatgcggaacctcacctcccttcagacacttgggatatcggattgtccagacctagttaaaatatgcagaaaacccaacggcgaggactatcccaaaattcaacacatccccggcattgtaagtgattgcagaaagtattttattcatttatatttattttatgcttagaatgatatacgccgtcgtccttaggtttccaatcttgaatttggtttttgttttctttctttgtttctttattcaacaccagcccatttatgattgattcattaaaaaaaggaagaagacaacgaattgagattcctggggtttttttttcgttggggttggttttcatgtatatgttgctgattaaatacgagactgatgatgattatgtgtttatgggttttaaatcagattaaatatatggaaaatgtaagttagttggggatgcacataaggtgtttgatgaaatgtctattagaaatgttgtttcttggacttagaatgatatacactgtcgtcctttggtttccaatcttacatttggtttgtgttttcttagtttgtttctttaatcaacaccaacccattttttttaaactacctgcaactactaatttacgtttaccctttatctcaggtactaaatgaatattggtgattttcagttactcaacactagcttgatcctgaacgcacccaaccttcaggttagaatccggcttactcatccttttgtccagttttcaagtaattgttttggcaggatcaattctctaattgttgtacaccgtatattgcaatttatagtgactacagttaatgaatgtttacaaaaaattagtcatgtaaaaacttcttctctgtccattacataaactcattttctctttctaacttatcatgttcatgtttaaaaaattaaacatgctcacatcattgttcatttgagctaacttacttctgtaagagagcgagctagttaacaactcctttaactttctgttttatactcaggacatggattgatgcaagcatgaagaacttctggaatttgctaaaactctaccaaagcgatgagagtttggactttgtttcacttgaagtcagggattgtcaacaaagccacagtgtgcatgttggctgtgtcacttggacgataaaaaggtttatttaattgttttcctaagtgtatttggcttacaagcttttacttttcacttgaaagggttttttttgttttaagctttttgaattagagtttcggttgaagtaagagtagtcgtattagtcttttactttgcaggagtctatgcctatataaggtaagactcgtatttgtaattttcagattatgcaattcaagttttcgagtgttttcttaaaaaaacatatcatacctgtgtgtagcataaagataaattctgatgctgtgcttcttgttatggctcacattggttttcattgtttggattgtttcacagggaagcagagaatacctggaacctatgaaggacgctatatctatagcagctttcacaggccaagtaatataatgttctttatcaatcactcaatacctggagattgtttgaacacataattcacctctttttttccatctcaaattgcagacttttactgggatttgaatgacagcaaacatttgattgtcacgaggattgatctaactggtgaatgttgtgatcaccatattggtctttctcattcaaacaaacttgcataccgttcttttgaattttgaagacaagcaggcgataatcaactcaggtcgaagctcatgtgcaggagagaatcgaatatagaggagattatttttaaaagaaacgctcaaaggtattgtagcacctttcctatttgctactgcagtgatgtttttatttcttgtttgcagcgcttgtttctcatatttcaacctacttttagaaaaaaaaacatctccgaacataaccaaaaataaagttcccttatcagtgctttccctgctttcttctaaacaacatatacaattataaaccctttttctctcttacctttgttattcttccttgcttcattgagataacactctcctgtttttgttttgttgttagtcattacatggatatatcaaggacaacagttctgtagtccgtcaactgtggttaggaaggctaaactggagcacaataaccccatgtcaattgaatagtaaaggtgtgctatatcagtttcgtttggcttggcttgtttacctgaaaaatggctggttatttatccttgtctctttctatgacgtgcagtggcttgttaatgtgtctcggacaacaattcctcactttccaagttccatacacgctgatgtaactatcttctgcagtctgttctttcatttttgccacgtgctctaattataactttttgtactcaataatcaactccttgtcccggtatttgcagagactacttaaacaggtaaagtgacaatcctggcgaagttgtctgtttcttagctctgaacccatcattcaggtaagattaagtatttaagaagaaattttgtttttacctaaaatgaatgatcttgtgtaactgcttgcttcttgcattaaataagaactttctgctgcatatgtgacagttacatccacaaaaaagttggaggtttgttcagggattggaaatgaaggtacttcagaattcctggaatgtttatgaatgctccagacttcagagtctttaatggaaaattcgagtcactaaaaatacattattcctatcatcagagctttcaagttcctctatacaaggtcaactgagttcctctttgcctcttgtttaattgtatttacttgtaccttaactataatctgtatattgttttagttaagttctaaaacaggttactattcatcatttgtgcagcatattgctggaatcaagaatctagtgcttcttcttcctgacttcactgtaaaccttaatctgttgctgaatttttttaatcgaaagactttctgtttaattatattctaaatctattacgatgtcttaaacagcttgaaaatgacacaaaatataatagctccacacctagataagaccctcaaatggaaatgtcagtaacttgttacatagagacaatatgctgatatatagttccacatagatcactcttctttactaaaaacacattatttttataacctggacattagtcgagagggggatgtcacgtcatgagaaatcttcatcagagccttcattactcggaattttattttctcccaaagctggtgaatttgccatagatgttgctgtacttcattcttatgatgttcaggtgacttgtcaggcctcactgcctcagactaacactctcgtgtttcttttctgttgttagtcatgacatggatacatcacgaacaacagttctgtagtccagcaactgtggtgtaggaagactaaactggagcacaataactccatgtcaattgaatggtaaagatgtgctatctcagtttcttttggcttgtttacatgaaaaacggctcgttttttatctgtgtctttctatgacgttcaggtgcagtggcttgttaatgtgtctcagacaacaattttctcactttccaagttccatacatgctgatgtaactatcttctgcactctgttctttcattttgccttttgctctaattataactttttgtactcaataatcaactccttgtcgcgtatttgcagggattacttaaataggtatagtgacaatcctggtgaagttgtctgtttcttagctctgatcccatcattcaggtaagattaagtagttaagaagaaacatttatttttacctaatttgaatgaacttgtgttaactgcttgcttcctgcattaaataagaactttctgctgcatatgtgacagttacatccacaaaaaagttggaggtttgttcagggattggaaatgaaggtacttcagaattcctggaatgtttatgaatgctccagacttcagagtctttaatggaaaattcgagtcactaaaaatacattattcctatcatcagagctttcaagttcctctatacaaggtcaactgagttcctctttgcctcttgtttaattgtatttactcgtaccttaattataatctgtatattgttttagttaagttctaaaacaggttactattcatcatttgtgcagcatattgctggaatcaagaatctagtgcttcatcttcctgacttcactgtcaaaatagtagttcccatgctggaaataagcgcgctagcaatgtaattgatgacatggatgttgctgcttctgagttttgatcataaaaagctgttatgtgtttcttgaatgtaatgaaggagaggagaaaactgaaaactcttggcaaaaacgtgaaattgcagtgcctcggggtggtagggatcacccggattcagttcagacgatacttttttcaacccggtttgttccggttttcagcttcgggttttccttgtacttttggggcacacatacaaggctacttcatgtttgagaaacctaattgaggctatcttgtagcaaatgcacaccacactctttctctcttctctccttttttcaccttccatttgtaaaaatcctcttttaaaggttaataaaaaaaagcttcaagtctcgtagggtggatgtaggtcacattgaccgaaccacggtaaactctttgtgttctttcttctctctttgtttctcatttttacggcaagtgtttatggttaaccatgcatcttagaatagcttaaggcattaacataataacatcaatgttctccaaagattcaccttacttgttgtacataatcacaatgttaagcctatgaaggtagaatgctctcatgatttggtttaaccaaaaaataaactctaaaataatacggagtaataaaaattggccataaactaattacaaagtttgatttttgtatagggtatcttgtacttgtgataaaaaaaattaaaaaaaaaaaatttacttatttcttctatttttacttgttacacttttctaca

SEQ ID NO: 91 - DNA, 2000 bp, Spinacia oleracea
ggcttaacttgctcaccaattcttaaatagactcgacttacactgaatttattgtgtactatgtctagaaagtaaggtcaacaactttcttctaaattattttggcatgtttattagggttattatgaaaaacatatcaaattggtgttgttagttaggcttgaataatatgattttaagtcacgagacttttataaattaggtaatttgatttaaaaaattgttacatatctaagaaaatggatgttaaatttatcagtcaatgtataaacaataaaagtcaatatgtatgtaaaagggttgctagataaaatctttggttttttggtccacaactccacactaagaggaactccaatgcttagttacaaggtggtgtagttaaaaagtaactccaatagttaactacacggtattatagttaaatttgccaactcaaatttctaactacaatatatttaagctacaaagtttctcattggctgactacaatacgttgtagcgccttataatattttattcaatatacaattttatttattttacctttttaacaatttttttttgatctacctgctgtcctgttcatatgagctacactaatttgatagctgcttacgcaattcttatatcaacggttggctacttgttcaaatatttttatttttttacgagtaagtcattttatgatcattgaagtggctctattattattatcatgcaccgattaacgcaagaataattaactcggtacgaattagtttcaaaataaaatccctcaaaaaaaaaagtttcaaaataaaattaacagaaaaccaaccttctccggtttactgttgttagagcatggaattttccagtaatcgcagaccccaaattatcttccagttgaatcaatccttgatttttggatttgccagaaaactccttgaattttagggttcatatttgatccgtaattgggaaaattttcagcaattgatcttccaaatcagccctacttgtttccagactgcaaatgaaaggtgcgaactttatactgcattttggttttccattagtgtaatttagtgtaatttattaagataaactgcattttgcaattgttttattcgactactcatttttaaatcaaattgcttaattgctagttagttttcttatcatattgccaaaaaaaattatttttgtttaattggtgaaaaagggtaaattatacctagtgtacaagattttcttgcacaccaccgttaatttgttgacacatcatcaaacgtactgaaaaatgagaatgaaagacaataaatatgtcattttaaccaatagaaaaacatgatgtagtaagatccttaattgatagataaataattaaatatcagtccattagttgaatattcaatgaaaatgtatggtccaaaaatggcgtttaatagtcaatgtcatgctttatggggtggtggagtactatgtgactgtgtgtggacttggagaagactagagagtatgattatcaacctatggaccctcaaaatgaaaatgaaaatgatgtttacacgtgctatttgcacggacttcaatgcaaatagtataaatttacggtcaaagttttcattctaaagcgtaaataactttcatgaatggaggacggtagtataagtataacgttatagcctaccattttcttatcatattcacataaatttgttgctgaaatttgttttacttggctaaaatacttttgttcttattggcagataaacatcagtacgtccattattggccaacttgctgagtccattattggccaacttgaacatatacctccaaacaataatcaataatgtcgattatgaagtttgtgaatgcaatttattatcactttcatttataaaatgactacttgattaacacatacaatattacctttctccaaacaccctttcaattctgcttaatcttgttttctcatcatctcttcatctttctgaaaacacaaccca

SEQ ID NO: 92 - DNA, 3492 bp, Spinacia oleracea
atggccgaaatcggatactcggtttgtgcgaaactcatcgaagtgattggcagtgagctgatcaaagagatttgtgacacatggggttacaaatctcttcttgaggacctcaacaaaactgtattgacggtcaggaacgttctcattcaagccggggtgatgcgggagcttactagtgaacaacaaggtttcattgcagaccttaaagatgttgtttatgatgctgatgacttgttcgacaagttactcactcgtgctgagcgaaaacagattgatggaaacgaaatctctgaaaaggtacgtcgtttcttttcctctagtaacaagatcggtcaagcttactacatgtctcgtaaggttaaggaaattaagaagcagttggatgaaattgttgataggcatacaaaatttgggtttagtgccgagtttatacctgtttgtagggaaagggggaacgagagggaaacacgttcatatatagatgtcaagaatattcttgggagggataaagataagaatgatatcatagataggttgcttaatcgtaatggtaatgaagcttgtagtttcctgaccatagtgggagcgggaggattgggaaaaactgctcttgcacaacttgtgttcaatgatgaaagggtcaaaattgagttccatgatttgaggtattgggtttgtgtctctgatcaagatgggggccaatttgatgtgaaagaaatcctttgtaagattttagaggtggttactaaggagaaagttgataatagttccacattggaattggtacaaagccaatttcaagagaagttaagaggaaagaagtacttccttgttcttgatgatgtatggaacgaagatcgtgagaagtggcttcctttggaagagttgttaatgttgggtcaagggggaagcaaggttgtagtgaccgcacgttcagagaagacagcaaatgtcatagggaaaagacatttttatacactggaatgtttgtcaccagattattcatggagcttatttgaaatgtcggcttttcagaaagggcatgagcaggaaaaccatcacgaactagttgatattgggaaaaagattgttgaaaaatgttataacaatccacttgctataacggtggtaggaagtcttctttatggagaggagataagtaagtggcggtcatttgaaatgagtgagttggccaaaattggcaatggggataataagattttgccgatattaaagctcagttaccataatcttataccctcgttgaagagttgcttcagttattgtgcagtgtttcccaaggatcatgaaataaagaaggagatgttgattgatctttggatagcacaaggatacgttgtggcacttgatggaggtcaaagtatagaagatgctgccgaagaacattttgtaattttgttacggagatgtttctttcaagatgtaaagaaggatgaatatggtgatgttgattctgttaaaatccacgacttgatgcacgatgtcgcccaagaagtggggagggaggaaatatgtgtagtgaatgataatacaaagaacttgggtgataaaatccgtcatgtacatggtgatgtcaatagatatgcacaaagagtctctctgtgtagccatagccataagattcgttcgtatattggtggtgattgtgaaaaacgttgtgtggatacactaatagacaagtggatgtgtcttaggatgttggacttgtcatggtcggatgttaaaaatttgcctaattcaataggtaaattgttgcacttgaggtatcttaacctgtcagataatagaaatctaaagatacttcctgatgcaattacaagactgcataatttgcagacactgcttttagaagattgcagaagtttaaaggagttgccaaaagatttttgcaaattggtcaaactgagacacttggatttatggggttgtgatgatttgattggtatgccatttggaatggataagctaactagtcttagaatactaccaaacattgtggtgggtaggaaggaacaaagtgttgatgatgagctgaaagcccttaaaggcctcaccgagataaaaggcgacattgatatcaaaatctgtgaaaattatagaatagttgaaggcatgaatgacacaggaggagctgggtatttgaagagcatgaaacatctcagggagattggtattacatttgatggtggatgtgttaaccctgaagctgtgttggcaaccctagagccaccttcaaatatcaagagcttatctatagataattacgatggtacaacaattccagtatggggaagagcagagattaattgggcaatctccctctcacatcttgtcgacatcacgcttgaagattgttacaatttgcaggagatgccagtgctgagtaaactgcctcatttgaaatcactgtatctttttaagttttgtaagttagagtacatggagagtagaagcagcagcagtagcagtgacacagaagcagcaacaccagaattaccaacattcttcccttcccttgaaaaacttagactttggtatctggaaaagttgaagggtttggggaacaggagaccgagtagttttccccgcctctctgaattggaaatctgggaatgcccagatctaacgtggtttcctccttgtccaagccttaaaacgttgaaattggaaaaaaacaatgaagcgttgcaaataatagtaaaaataacaacaacaagaggtaaagaagaaaaagaagaagacaagaatgctggtgttggaaattcacaagatgatgacaatgtcaaattacggaaggtggaaatagacaatgtgagttatctcaaatcactgcccacaaattgtcttactcacctcaaaataactggaatagattacagggagggggagattgaatcagattccgtggaggaggagattgaattggaagttggggaggcatttcagaagtgtgcatcttctttgagaagcctcatcataatcggaaatcacggaataaataaagtgatgagactgtctggaagaacagggttggagcatttcactctgttggactcactcaaattttcaaagatagaagaccaggaagatgagggcgaagacaacatcatattctggaaatcctttcctcaaaacctccgcagtttggaaattaaaggctcttgcaaaatgacaagtttgcccatggggatgcagtacttaacctccctccaaaccctcgaactatcatattgtgatgaattgaattcccttccagaatggataagcagcttatcatctcttcaatacctgcgcatatacaactgtccagccctgaaatcactaccagaagcaatgcggaacctcacctcccttcagacacttgggatatcggattgtccagacctagttaaaatatgcagaaaacccaacggcgaggactatcccaaaattcaacacatccccggcattgtactaaatgaatattggtga

SEQ ID NO: 93 - DNA, 3525 bp, Spinacia oleracea
atggccgaaatcggatactcggtttgtgcgaaactcatcgaagtgattggcagtgagctgatcaaagagatttgtgacacatggggttacaaatctcttcttgaggacctcaacaaaactgtattgacggtcaggaacgttctcattcaagccggggtgatgcgggagcttactagtgaacaacaaggtttcattgcagaccttaaagatgttgtttatgatgctgatgacttgttcgacaagttactcactcgtgctgagcgaaaacagattgatggaaacgaaatctctgaaaaggtacgtcgtttcttttcctctagtaacaagatcggtcaagcttactacatgtctcgtaaggttaaggaaattaagaagcagttggatgaaattgttgataggcatacaaaatttgggtttagtgccgagtttatacctgtttgtagggaaagggggaacgagagggaaacacgttcatatatagatgtcaagaatattcttgggagggataaagataagaatgatatcatagataggttgcttaatcgtaatggtaatgaagcttgtagtttcctgaccatagtgggagcgggaggattgggaaaaactgctcttgcacaacttgtgttcaatgatgaaagggtcaaaattgagttccatgatttgaggtattgggtttgtgtctctgatcaagatgggggccaatttgatgtgaaagaaatcctttgtaagattttagaggtggttactaaggagaaagttgataatagttccacattggaattggtacaaagccaatttcaagagaagttaagaggaaagaagtacttccttgttcttgatgatgtatggaacgaagatcgtgagaagtggcttcctttggaagagttgttaatgttgggtcaagggggaagcaaggttgtagtgaccgcacgttcagagaagacagcaaatgtcatagggaaaagacatttttatacactggaatgtttgtcaccagattattcatggagcttatttgaaatgtcggcttttcagaaagggcatgagcaggaaaaccatcacgaactagttgatattgggaaaaagattgttgaaaaatgttataacaatccacttgctataacggtggtaggaagtcttctttatggagaggagataagtaagtggcggtcatttgaaatgagtgagttggccaaaattggcaatggggataataagattttgccgatattaaagctcagttaccataatcttataccctcgttgaagagttgcttcagttattgtgcagtgtttcccaaggatcatgaaataaagaaggagatgttgattgatctttggatagcacaaggatacgttgtggcacttgatggaggtcaaagtatagaagatgctgccgaagaacattttgtaattttgttacggagatgtttctttcaagatgtaaagaaggatgaatatggtgatgttgattctgttaaaatccacgacttgatgcacgatgtcgcccaagaagtggggagggaggaaatatgtgtagtgaatgataatacaaagaacttgggtgataaaatccgtcatgtacatggtgatgtcaatagatatgcacaaagagtctctctgtgtagccatagccataagattcgttcgtatattggtggtgattgtgaaaaacgttgtgtggatacactaatagacaagtggatgtgtcttaggatgttggacttgtcatggtcggatgttaaaaatttgcctaattcaataggtaaattgttgcacttgaggtatcttaacctgtcagataatagaaatctaaagatacttcctgatgcaattacaagactgcataatttgcagacactgcttttagaagattgcagaagtttaaaggagttgccaaaagatttttgcaaattggtcaaactgagacacttggatttatggggttgtgatgatttgattggtatgccatttggaatggataagctaactagtcttagaatactaccaaacattgtggtgggtaggaaggaacaaagtgttgatgatgagctgaaagcccttaaaggcctcaccgagataaaaggcgacattgatatcaaaatctgtgaaaattatagaatagttgaaggcatgaatgacacaggaggagctgggtatttgaagagcatgaaacatctcagggagattggtattacatttgatggtggatgtgttaaccctgaagctgtgttggcaaccctagagccaccttcaaatatcaagagcttatctatagataattacgatggtacaacaattccagtatggggaagagcagagattaattgggcaatctccctctcacatcttgtcgacatcacgcttgaagattgttacaatttgcaggagatgccagtgctgagtaaactgcctcatttgaaatcactgtatctttttaagttttgtaagttagagtacatggagagtagaagcagcagcagtagcagtgacacagaagcagcaacaccagaattaccaacattcttcccttcccttgaaaaacttagactttggtatctggaaaagttgaagggtttggggaacaggagaccgagtagttttccccgcctctctgaattggaaatctgggaatgcccagatctaacgtggtttcctccttgtccaagccttaaaacgttgaaattggaaaaaaacaatgaagcgttgcaaataatagtaaaaataacaacaacaagaggtaaagaagaaaaagaagaagacaagaatgctggtgttggaaattcacaagatgatgacaatgtcaaattacggaaggtggaaatagacaatgtgagttatctcaaatcactgcccacaaattgtcttactcacctcaaaataactggaatagattacagggagggggagattgaatcagattccgtggaggaggagattgaattggaagttggggaggcatttcagaagtgtgcatcttctttgagaagcctcatcataatcggaaatcacggaataaataaagtgatgagactgtctggaagaacagggttggagcatttcactctgttggactcactcaaattttcaaagatagaagaccaggaagatgagggcgaagacaacatcatattctggaaatcctttcctcaaaacctccgcagtttggaaattaaaggctcttgcaaaatgacaagtttgcccatggggatgcagtacttaacctccctccaaaccctcgaactatcatattgtgatgaattgaattcccttccagaatggataagcagcttatcatctcttcaatacctgcgcatatacaactgtccagccctgaaatcactaccagaagcaatgcggaacctcacctcccttcagacacttgggatatcggattgtccagacctagttaaaatatgcagaaaacccaacggcgaggactatcccaaaattcaacacatccccggcattttactcaacactagcttgatcctgaacgcacccaaccttcaggacatggattga

SEQ ID NO: 94 - protein, 1163 aa, Spinacia oleracea
MAEIGYSVCAKLIEVIGSELIKEICDTWGYKSLLEDLNKTVLTVRNVLIQAGVMRELTSEQQGFIADLKDVVYDADDLFDKLLTRAERKQIDGNEISEKVRRFFSSSNKIGQAYYMSRKVKEIKKQLDEIVDRHTKFGFSAEFIPVCRERGNERETRSYIDVKNILGRDKDKNDIIDRLLNRNGNEACSFLTIVGAGGLGKTALAQLVFNDERVKIEFHDLRYWVCVSDQDGGQFDVKEILCKILEVVTKEKVDNSSTLELVQSQFQEKLRGKKYFLVLDDVWNEDREKWLPLEELLMLGQGGSKVVVTARSEKTANVIGKRHFYTLECLSPDYSWSLFEMSAFQKGHEQENHHELVDIGKKIVEKCYNNPLAITVVGSLLYGEEISKWRSFEMSELAKIGNGDNKILPILKLSYHNLIPSLKSCFSYCAVFPKDHEIKKEMLIDLWIAQGYVVALDGGQSIEDAAEEHFVILLRRCFFQDVKKDEYGDVDSVKIHDLMHDVAQEVGREEICVVNDNTKNLGDKIRHVHGDVNRYAQRVSLCSHSHKIRSYIGGDCEKRCVDTLIDKWMCLRMLDLSWSDVKNLPNSIGKLLHLRYLNLSDNRNLKILPDAITRLHNLQTLLLEDCRSLKELPKDFCKLVKLRHLDLWGCDDLIGMPFGMDKLTSLRILPNIVVGRKEQSVDDELKALKGLTEIKGDIDIKICENYRIVEGMNDTGGAGYLKSMKHLREIGITFDGGCVNPEAVLATLEPPSNIKSLSIDNYDGTTIPVWGRAEINWAISLSHLVDITLEDCYNLQEMPVLSKLPHLKSLYLFKFCKLEYMESRSSSSSSDTEAATPELPTFFPSLEKLRLWYLEKLKGLGNRRPSSFPRLSELEIWECPDLTWFPPCPSLKTLKLEKNNEALQIIVKITTTRGKEEKEEDKNAGVGNSQDDDNVKLRKVEIDNVSYLKSLPTNCLTHLKITGIDYREGEIESDSVEEEIELEVGEAFQKCASSLRSLIIIGNHGINKVMRLSGRTGLEHFTLLDSLKFSKIEDQEDEGEDNIIFWKSFPQNLRSLEIKGSCKMTSLPMGMQYLTSLQTLELSYCDELNSLPEWISSLSSLQYLRIYNCPALKSLPEAMRNLTSLQTLGISDCPDLVKICRKPNGEDYPKIQHIPGIVLNEYW

SEQ ID NO: 95 - protein, 1174 aa, Spinacia oleracea
MAEIGYSVCAKLIEVIGSELIKEICDTWGYKSLLEDLNKTVLTVRNVLIQAGVMRELTSEQQGFIADLKDVVYDADDLFDKLLTRAERKQIDGNEISEKVRRFFSSSNKIGQAYYMSRKVKEIKKQLDEIVDRHTKFGFSAEFIPVCRERGNERETRSYIDVKNILGRDKDKNDIIDRLLNRNGNEACSFLTIVGAGGLGKTALAQLVFNDERVKIEFHDLRYWVCVSDQDGGQFDVKEILCKILEVVTKEKVDNSSTLELVQSQFQEKLRGKKYFLVLDDVWNEDREKWLPLEELLMLGQGGSKVVVTARSEKTANVIGKRHFYTLECLSPDYSWSLFEMSAFQKGHEQENHHELVDIGKKIVEKCYNNPLAITVVGSLLYGEEISKWRSFEMSELAKIGNGDNKILPILKLSYHNLIPSLKSCFSYCAVFPKDHEIKKEMLIDLWIAQGYVVALDGGQSIEDAAEEHFVILLRRCFFQDVKKDEYGDVDSVKIHDLMHDVAQEVGREEICVVNDNTKNLGDKIRHVHGDVNRYAQRVSLCSHSHKIRSYIGGDCEKRCVDTLIDKWMCLRMLDLSWSDVKNLPNSIGKLLHLRYLNLSDNRNLKILPDAITRLHNLQTLLLEDCRSLKELPKDFCKLVKLRHLDLWGCDDLIGMPFGMDKLTSLRILPNIVVGRKEQSVDDELKALKGLTEIKGDIDIKICENYRIVEGMNDTGGAGYLKSMKHLREIGITFDGGCVNPEAVLATLEPPSNIKSLSIDNYDGTTIPVWGRAEINWAISLSHLVDITLEDCYNLQEMPVLSKLPHLKSLYLFKFCKLEYMESRSSSSSSDTEAATPELPTFFPSLEKLRLWYLEKLKGLGNRRPSSFPRLSELEIWECPDLTWFPPCPSLKTLKLEKNNEALQIIVKITTTRGKEEKEEDKNAGVGNSQDDDNVKLRKVEIDNVSYLKSLPTNCLTHLKITGIDYREGEIESDSVEEEIELEVGEAFQKCASSLRSLIIIGNHGINKVMRLSGRTGLEHFTLLDSLKFSKIEDQEDEGEDNIIFWKSFPQNLRSLEIKGSCKMTSLPMGMQYLTSLQTLELSYCDELNSLPEWISSLSSLQYLRIYNCPALKSLPEAMRNLTSLQTLGISDCPDLVKICRKPNGEDYPKIQHIPGILLNTSLILNAPNLQDMD

SEQ ID NO: 96 - DNA, 4949 bp, Spinacia oleracea
atggctgaaatcggatactcggtttgttcaaaacttattgaagtgatgggcagtaagatcattaaagagatttgcgacatgtggggttacaattctcatcttgacgacctcaacaaatctgtcttgacgatcaaggatgtgctcttggatgctgaggcgaagcgggatctttcccgtgaacaacagagttacattgcagaacttaaggatgttgtttacgatgctgatgatttgttcgatgagttcctcactcttgctgagctcaaacagattgatggcaacaacaagggtggtggtaaattctccaaaaaggtacgtcgtttcttttcttctaataaggagaagatgggtcaagcttacaagatgtctcatatggttaaagaaattaagaagcagttgggtgaaattgttgataggtataccaaatttgggtttattgttgattataaacctattattaggagaagggaggaaacatgttcttattttgtaggtgccaaggagattgttgggagggataaggataaagatgttatcataggcatgttgctagatcatgataacgattgtagtttcttggctgttgtgggggttggaggggtgggaaaaactactcttgcccaacttgtgtataatgatgaaagagtcaaaagtgagttccaagatttgaggtattgggtttgtgtctctgatcaagatgggggacaatttgatgacaaaagaattctttgtaagattatagagttagttacgggccagattcctccgagtaacgagagcatggaatcggtgcgtaagaaatttcaagaggaattaggaggaaagaagtacttccttgttcttgatgatgtatggaacgaggatcgccagaagtggcttcatctagaaaatttcttgaaattgggtcaagggggaagcaagattgtggtaaccacacgttcagagaagacggcaaatgttatagggaaaagacaagactataaactagaatgtttgtcagcagaggattcatggcgcttatttgaaatgtcagcttttgacgaagggcatggccaggaaaactatgacgaattagtgacgattggcaagaagattgttgaaaaatgttataacaatccacttgctataacagtggtaggaagccttctttttggacaagagataaataagtggcggtcgtttgaaagcagtggattagcccaaattgccaatggtgataatcagattttcccgatattaaagctcagttaccacaatcttccacactccttgaagagctgctttagctattgtgcagtgtttcccaaagattatgaaataaagaaggagatgttgattgatctttggatagcacaaggatacattataccgttggatggaggtcaaagtatagaagatgctgccgaggaacattttgtaattttgttaagaagatgtttctttcaagatgtaaagaaggattctcttggtaatgttgattatgttaaaatccacgacttaatgcacgatgtcgctcaagaagtggggaaggaggaaatctgtgtagtgacttcaggtacaaagaagttggctgataaaatccgtcacgtgggttgtgttgtcgatagagatccagaaatagtctttttatgtagcaataagattcgttcgtatattagcggtcgttgtataaagaatccggtggattcacaaatagacaactggatgcgccttagggtgttggacttgtcagattcatgtgttaaagatttgtctgattcaataggtaagctgctgcacttaaggtatcttaacctctcttctaatataaagttggagataatccctgatgcaattacaagactgcataacttgcagacactgcttttaaaagattgcagaagtttaaaggagttgccaaaagatttttgcaaattggtcaaactgagacacttggatttaaggggttgtcagtgtttgattggtatgccattgggaatggataggctaattagtcttagagtactaccaaaagttgtggtgggtaagaaggaacaaagtgatgatcagctgaaagccctaaaaggcctcaccgagataaaaggctccattgatatcacaatctattcaaagtatagaatagttgaaggcatgaatgacacaggaggagctgggtatttgaagagcatgaaacatctcacgggggttgatattagatttgatgatagagaaggtggatttgttaaccctgaagctgtgttggcaaccctagagccaccttcaaatatcaagagcttatctatacatcgttttgatggtaaaacacttccagtatggggaagagcagagattaattgggcaatctccctctcacatcttgtcgacatccagctttggcattgtcgtaatttgcaggagatgccagtgctgagtaaactgcctcatttgaaatcactggaacttacagagttggataacttagagtacatggagagtagaagcagcagcagtagcagtgacacagaagcagcaacaccagaattaccaacattcttcccttcccttgaaaaacttacactttggggtctggaaaagttgaagggtttggggaacaggagatcgagtagttttccccgcctctctaaattggaaatctgggaatgcccagatctaacgtcatttccttcttgtccaagccttgaaaagttggaattgaaagaaaacaatgaagcgttgcaaataatagtaaaaataacaacaacaagaggtaaagaagaaaaagaagaagacaagaatgctggtgttggaaattcacaagatgatgacaatgtcaaattatggaaggtggaaatagacaatctgggttatctcaaatcactgcccacaaattgtctgactcacctcgaccttacaataagtgattccaaggagggggagggtgaatgggaagttggggatgcatttcagaagtgtgtatcttctttgagaagcctcaccataatcggaaatcacggaataaataaagtgaagagactgtctggaagaacagggttggagcatttcactctgttggaatcactcaaactttcagatatagaagaccaggaagatgagggcgaagacaacatcatattctggaaatcctttcctcaaaacctccgcagtttgagaattaaagactctgacaaaatgacaagtttgcccatggggatgcagtacttaacctccctccaaaccctctatctacaccattgttatgaattgaattcccttccagaatggataagcagcttatcatctcttcaatacctgcgcatatactactgtccagccctgaaatcactaccagaagcaatgcggaacctcacctcccttcagacacttgggatatcggattgtccagacctagttaaaagatgcagaaaacccaacggcaaggactatcccaaaattcaacacatccccaaaattgtaagtcattgcagaaagtaatttattcatttatatttattttatgcttagaatgatatacaccgtcgtcctttggtttcaaatcttgaatttggtttttgttttctttctttgtttctttattcaacaccagcccatttatgattgattcattaaaaaaaggatggagttttgtggatttgcagaagacaacgaattgagattcgtggggttttctttttgttggggttggatttcatgtatatgttgctgattgaatacgagactgatgatgatgatgtgtttaatttatgggttttaaatcagattaaatatatgggaaatgtaagttaattggggatgcacataaggtgtttgatgaaatgtctattagaaatgttgtttcttggacttagaatgatatacactgtcgtcctttggtttccaatctggaatttggtttttgttttcttagtttgtttctttattccacactagcccattttttttaaactacctgcaactactaaatttcatttaccctgtatctcagattagagggtagtaattctcatttactcaacactagcttgatcctgaacgcagccaaccttcaggttagaatccgccttactcatccttttgtcatgtattgttttaagttgttttgcttgcttgtgtaatcatgattcatagtatacgattcatcattcactatgtctacaggcaagatattggaattgttcacgattccctgaagtttctttgcttttgttgataccaccatattgcagcttatagtgactaagttaatgaatgtttcaaaaaaattagtcatataaattcttcttctctctctattacataaactctttttctctttctaacttatcatgttcatgtctaaaacttatacatgctcacatcattgttcgtttcagctgacttacttctgtaagagagctatctagttaacaactcttgtaacattttatttgctagtcagaacatggattggtgcaagcatgggaatttgccaacactctaccaaatcgattggagtttggacttagtttcaccagaagccatacccggccacttactggggactgtcaacaaagccgcattgtgatgtacttggatgtttcacgtgcctgaggtgtgagttacttggaagggaagcggtttatttaattgttttcctaagtagattttgcttagaagcttttacttttcacttgaaagggtttttcttgttttaagcttttcgaattagagtttcggttgcattaagagtagtcgtattagtctttttttacctaaggaagacttttttgtaattttcagacgatgcaattcaacttttcgagtgttttgtttgaattgaagaattagtgatttcatttgatcgattgagatgtcttattataagcgtatatgctcttggatttggccacttaggtcttgtttgacaattggttattaactcgcttttatattttcttttctcttaggaaagg

SEQ ID NO: 97 - DNA, 2000 bp, Spinacia oleracea
  unsure 857..876
gagcaagtgcaccagcaggaaagatttaccaggagtatggaattacagttgaggcagttgttgaagctgcaaaatcagtttgttaggattctttttgcctcctgtttttccatttttgttgactgatcaagtagacatggctccctggtgagttactgtattacagtaaaaaaaaaaccgaaaacttttagatactgtaaagataaactttgaaggctttcttgcagtattatgatgaatgtttgttgatttgtgtactaaaacttcaatccaatgttgtagtgtggacagtatttctgaaaaggaacaacaataatgtgaagctcccattttactggattttgtatccttttttatgggagttacagtaaaaaaattctgaatctataccatgagcttgattattagcatgtaacagttgaatgatttttccttcccatttttatcagattttgtttgtatggaagtgttgctatatttgattgggaatgacctgttttgttcatcagtttatatgactggttagtaagacatgtctgatgtctaaaagggtatggactacaagccaataaacaactacttcgtgttttttttttaatgttataattgactatttgatgtttcacgtttgtcaatgcgaaactttagcacaactggttagcaagagatcacatgtctgatgtctttatccatttgaatgggccatatgttggccatatacatttctaaaaaggtatgggctacaacgaggttgttttttcggatatcagaacacacatatcagctaaaagacaaatagctaaaagacaaaaaaggaagtaccatttatgttaaaaaagtatcattctgtaaaaaannnnnnnnnnnnnnnnnnnnatttttgtttaaccggtgaaaaagggtaaattataccaccgttaatttgttgacacatcatcaaacgtactgaaaaatgagaatgaaagacaataaatatgtcattttaaccaatagaaaaacatgatgagtaagatccttaattgatagataaataattaaatatcagtccattagttgaatattcaatgaaaatgtatggtccaaaaatggcgtttaatagtcaatgtcatgctttatggggtggtggagtactatgtgactgtgtgtggacttggagaagactagagagtatgattatcaacatatagaccctgaaaatgaaaatgaaaatgatgtttttacactttaaaatcgtcaagaaacaacaatcctttttagcaatagtatttacacgcgctagttgcacgaactttaatgcaaatagtataaatttacggtcaaagttttcatactttagacacatactctctccgtcccttaatactcgcaccgctttccttttcgggccgtcccttaatacttgcaccgcttctataaatggaaatctatttctcacaattacctactaacccacctacactcatcgtccctacaaaaaatcatttaaaaattcacaccccacactcaccactcctcacccattacacatttcctactaactatattaaaaaaatatcccactataaactaacactcattaaattaataagtcaattcaaatatcttaaactccgcaccggtcaaatcggtgcgagtattaagggacggagggagtattatagagtgtaaataactttcatgaatggagggagtaaaaaattgttttacttggctaaaatacttttgttcttattggcagataaacatgagtccattattggccaacttgaacatatacctccaaacaataatcaataatgtcgattatgaagtttgtgaatgcaatttattatcactttcattgcaagttgtcatctgtgctgagtgttgatttataaaaaggactacttgattaacacatacaatattactccacctttctccagacaacctttcaattctgctttatcttgttttctcatcattcattcatctcttcatctttctgaaaacacaaccca

SEQ ID NO: 98 - DNA, 3462 bp, Spinacia oleracea
atggctgaaatcggatactcggtttgttcaaaacttattgaagtgatgggcagtaagatcattaaagagatttgcgacatgtggggttacaattctcatcttgacgacctcaacaaatctgtcttgacgatcaaggatgtgctcttggatgctgaggcgaagcgggatctttcccgtgaacaacagagttacattgcagaacttaaggatgttgtttacgatgctgatgatttgttcgatgagttcctcactcttgctgagctcaaacagattgatggcaacaacaagggtggtggtaaattctccaaaaaggtacgtcgtttcttttcttctaataaggagaagatgggtcaagcttacaagatgtctcatatggttaaagaaattaagaagcagttgggtgaaattgttgataggtataccaaatttgggtttattgttgattataaacctattattaggagaagggaggaaacatgttcttattttgtaggtgccaaggagattgttgggagggataaggataaagatgttatcataggcatgttgctagatcatgataacgattgtagtttcttggctgttgtgggggttggaggggtgggaaaaactactcttgcccaacttgtgtataatgatgaaagagtcaaaagtgagttccaagatttgaggtattgggtttgtgtctctgatcaagatgggggacaatttgatgacaaaagaattctttgtaagattatagagttagttacgggccagattcctccgagtaacgagagcatggaatcggtgcgtaagaaatttcaagaggaattaggaggaaagaagtacttccttgttcttgatgatgtatggaacgaggatcgccagaagtggcttcatctagaaaatttcttgaaattgggtcaagggggaagcaagattgtggtaaccacacgttcagagaagacggcaaatgttatagggaaaagacaagactataaactagaatgtttgtcagcagaggattcatggcgcttatttgaaatgtcagcttttgacgaagggcatggccaggaaaactatgacgaattagtgacgattggcaagaagattgttgaaaaatgttataacaatccacttgctataacagtggtaggaagccttctttttggacaagagataaataagtggcggtcgtttgaaagcagtggattagcccaaattgccaatggtgataatcagattttcccgatattaaagctcagttaccacaatcttccacactccttgaagagctgctttagctattgtgcagtgtttcccaaagattatgaaataaagaaggagatgttgattgatctttggatagcacaaggatacattataccgttggatggaggtcaaagtatagaagatgctgccgaggaacattttgtaattttgttaagaagatgtttctttcaagatgtaaagaaggattctcttggtaatgttgattatgttaaaatccacgacttaatgcacgatgtcgctcaagaagtggggaaggaggaaatctgtgtagtgacttcaggtacaaagaagttggctgataaaatccgtcacgtgggttgtgttgtcgatagagatccagaaatagtctttttatgtagcaataagattcgttcgtatattagcggtcgttgtataaagaatccggtggattcacaaatagacaactggatgcgccttagggtgttggacttgtcagattcatgtgttaaagatttgtctgattcaataggtaagctgctgcacttaaggtatcttaacctctcttctaatataaagttggagataatccctgatgcaattacaagactgcataacttgcagacactgcttttaaaagattgcagaagtttaaaggagttgccaaaagatttttgcaaattggtcaaactgagacacttggatttaaggggttgtcagtgtttgattggtatgccattgggaatggataggctaattagtcttagagtactaccaaaagttgtggtgggtaagaaggaacaaagtgatgatcagctgaaagccctaaaaggcctcaccgagataaaaggctccattgatatcacaatctattcaaagtatagaatagttgaaggcatgaatgacacaggaggagctgggtatttgaagagcatgaaacatctcacgggggttgatattagatttgatgatagagaaggtggatttgttaaccctgaagctgtgttggcaaccctagagccaccttcaaatatcaagagcttatctatacatcgttttgatggtaaaacacttccagtatggggaagagcagagattaattgggcaatctccctctcacatcttgtcgacatccagctttggcattgtcgtaatttgcaggagatgccagtgctgagtaaactgcctcatttgaaatcactggaacttacagagttggataacttagagtacatggagagtagaagcagcagcagtagcagtgacacagaagcagcaacaccagaattaccaacattcttcccttcccttgaaaaacttacactttggggtctggaaaagttgaagggtttggggaacaggagatcgagtagttttccccgcctctctaaattggaaatctgggaatgcccagatctaacgtcatttccttcttgtccaagccttgaaaagttggaattgaaagaaaacaatgaagcgttgcaaataatagtaaaaataacaacaacaagaggtaaagaagaaaaagaagaagacaagaatgctggtgttggaaattcacaagatgatgacaatgtcaaattatggaaggtggaaatagacaatctgggttatctcaaatcactgcccacaaattgtctgactcacctcgaccttacaataagtgattccaaggagggggagggtgaatgggaagttggggatgcatttcagaagtgtgtatcttctttgagaagcctcaccataatcggaaatcacggaataaataaagtgaagagactgtctggaagaacagggttggagcatttcactctgttggaatcactcaaactttcagatatagaagaccaggaagatgagggcgaagacaacatcatattctggaaatcctttcctcaaaacctccgcagtttgagaattaaagactctgacaaaatgacaagtttgcccatggggatgcagtacttaacctccctccaaaccctctatctacaccattgttatgaattgaattcccttccagaatggataagcagcttatcatctcttcaatacctgcgcatatactactgtccagccctgaaatcactaccagaagcaatgcggaacctcacctcccttcagacacttgggatatcggattgtccagacctagttaaaagatgcagaaaacccaacggcaaggactatcccaaaattcaacacatccccaaaattattagagggtag

SEQ ID NO: 99 - DNA, 3486 bp, Spinacia oleracea
atggctgaaatcggatactcggtttgttcaaaacttattgaagtgatgggcagtaagatcattaaagagatttgcgacatgtggggttacaattctcatcttgacgacctcaacaaatctgtcttgacgatcaaggatgtgctcttggatgctgaggcgaagcgggatctttcccgtgaacaacagagttacattgcagaacttaaggatgttgtttacgatgctgatgatttgttcgatgagttcctcactcttgctgagctcaaacagattgatggcaacaacaagggtggtggtaaattctccaaaaaggtacgtcgtttcttttcttctaataaggagaagatgggtcaagcttacaagatgtctcatatggttaaagaaattaagaagcagttgggtgaaattgttgataggtataccaaatttgggtttattgttgattataaacctattattaggagaagggaggaaacatgttcttattttgtaggtgccaaggagattgttgggagggataaggataaagatgttatcataggcatgttgctagatcatgataacgattgtagtttcttggctgttgtgggggttggaggggtgggaaaaactactcttgcccaacttgtgtataatgatgaaagagtcaaaagtgagttccaagatttgaggtattgggtttgtgtctctgatcaagatgggggacaatttgatgacaaaagaattctttgtaagattatagagttagttacgggccagattcctccgagtaacgagagcatggaatcggtgcgtaagaaatttcaagaggaattaggaggaaagaagtacttccttgttcttgatgatgtatggaacgaggatcgccagaagtggcttcatctagaaaatttcttgaaattgggtcaagggggaagcaagattgtggtaaccacacgttcagagaagacggcaaatgttatagggaaaagacaagactataaactagaatgtttgtcagcagaggattcatggcgcttatttgaaatgtcagcttttgacgaagggcatggccaggaaaactatgacgaattagtgacgattggcaagaagattgttgaaaaatgttataacaatccacttgctataacagtggtaggaagccttctttttggacaagagataaataagtggcggtcgtttgaaagcagtggattagcccaaattgccaatggtgataatcagattttcccgatattaaagctcagttaccacaatcttccacactccttgaagagctgctttagctattgtgcagtgtttcccaaagattatgaaataaagaaggagatgttgattgatctttggatagcacaaggatacattataccgttggatggaggtcaaagtatagaagatgctgccgaggaacattttgtaattttgttaagaagatgtttctttcaagatgtaaagaaggattctcttggtaatgttgattatgttaaaatccacgacttaatgcacgatgtcgctcaagaagtggggaaggaggaaatctgtgtagtgacttcaggtacaaagaagttggctgataaaatccgtcacgtgggttgtgttgtcgatagagatccagaaatagtctttttatgtagcaataagattcgttcgtatattagcggtcgttgtataaagaatccggtggattcacaaatagacaactggatgcgccttagggtgttggacttgtcagattcatgtgttaaagatttgtctgattcaataggtaagctgctgcacttaaggtatcttaacctctcttctaatataaagttggagataatccctgatgcaattacaagactgcataacttgcagacactgcttttaaaagattgcagaagtttaaaggagttgccaaaagatttttgcaaattggtcaaactgagacacttggatttaaggggttgtcagtgtttgattggtatgccattgggaatggataggctaattagtcttagagtactaccaaaagttgtggtgggtaagaaggaacaaagtgatgatcagctgaaagccctaaaaggcctcaccgagataaaaggctccattgatatcacaatctattcaaagtatagaatagttgaaggcatgaatgacacaggaggagctgggtatttgaagagcatgaaacatctcacgggggttgatattagatttgatgatagagaaggtggatttgttaaccctgaagctgtgttggcaaccctagagccaccttcaaatatcaagagcttatctatacatcgttttgatggtaaaacacttccagtatggggaagagcagagattaattgggcaatctccctctcacatcttgtcgacatccagctttggcattgtcgtaatttgcaggagatgccagtgctgagtaaactgcctcatttgaaatcactggaacttacagagttggataacttagagtacatggagagtagaagcagcagcagtagcagtgacacagaagcagcaacaccagaattaccaacattcttcccttcccttgaaaaacttacactttggggtctggaaaagttgaagggtttggggaacaggagatcgagtagttttccccgcctctctaaattggaaatctgggaatgcccagatctaacgtcatttccttcttgtccaagccttgaaaagttggaattgaaagaaaacaatgaagcgttgcaaataatagtaaaaataacaacaacaagaggtaaagaagaaaaagaagaagacaagaatgctggtgttggaaattcacaagatgatgacaatgtcaaattatggaaggtggaaatagacaatctgggttatctcaaatcactgcccacaaattgtctgactcacctcgaccttacaataagtgattccaaggagggggagggtgaatgggaagttggggatgcatttcagaagtgtgtatcttctttgagaagcctcaccataatcggaaatcacggaataaataaagtgaagagactgtctggaagaacagggttggagcatttcactctgttggaatcactcaaactttcagatatagaagaccaggaagatgagggcgaagacaacatcatattctggaaatcctttcctcaaaacctccgcagtttgagaattaaagactctgacaaaatgacaagtttgcccatggggatgcagtacttaacctccctccaaaccctctatctacaccattgttatgaattgaattcccttccagaatggataagcagcttatcatctcttcaatacctgcgcatatactactgtccagccctgaaatcactaccagaagcaatgcggaacctcacctcccttcagacacttgggatatcggattgtccagacctagttaaaagatgcagaaaacccaacggcaaggactatcccaaaattcaacacatccccaaaattagggtagtaattctcatttactcaacactagcttga

SEQ ID NO: 100 - protein, 1153 aa, Spinacia oleracea
MAEIGYSVCSKLIEVMGSKIIKEICDMWGYNSHLDDLNKSVLTIKDVLLDAEAKRDLSREQQSYIAELKDVVYDADDLFDEFLTLAELKQIDGNNKGGGKFSKKVRRFFSSNKEKMGQAYKMSHMVKEIKKQLGEIVDRYTKFGFIVDYKPIIRRREETCSYFVGAKEIVGRDKDKDVIIGMLLDHDNDCSFLAVVGVGGVGKTTLAQLVYNDERVKSEFQDLRYWVCVSDQDGGQFDDKRILCKIIELVTGQIPPSNESMESVRKKFQEELGGKKYFLVLDDVWNEDRQKWLHLENFLKLGQGGSKIVVTTRSEKTANVIGKRQDYKLECLSAEDSWRLFEMSAFDEGHGQENYDELVTIGKKIVEKCYNNPLAITVVGSLLFGQEINKWRSFESSGLAQIANGDNQIFPILKLSYHNLPHSLKSCFSYCAVFPKDYEIKKEMLIDLWIAQGYIIPLDGGQSIEDAAEEHFVILLRRCFFQDVKKDSLGNVDYVKIHDLMHDVAQEVGKEEICVVTSGTKKLADKIRHVGCVVDRDPEIVFLCSNKIRSYISGRCIKNPVDSQIDNWMRLRVLDLSDSCVKDLSDSIGKLLHLRYLNLSSNIKLEIIPDAITRLHNLQTLLLKDCRSLKELPKDFCKLVKLRHLDLRGCQCLIGMPLGMDRLISLRVLPKVVVGKKEQSDDQLKALKGLTEIKGSIDITIYSKYRIVEGMNDTGGAGYLKSMKHLTGVDIRFDDREGGFVNPEAVLATLEPPSNIKSLSIHRFDGKTLPVWGRAEINWAISLSHLVDIQLWHCRNLQEMPVLSKLPHLKSLELTELDNLEYMESRSSSSSSDTEAATPELPTFFPSLEKLTLWGLEKLKGLGNRRSSSFPRLSKLEIWECPDLTSFPSCPSLEKLELKENNEALQIIVKITTTRGKEEKEEDKNAGVGNSQDDDNVKLWKVEIDNLGYLKSLPTNCLTHLDLTISDSKEGEGEWEVGDAFQKCVSSLRSLTIIGNHGINKVKRLSGRTGLEHFTLLESLKLSDIEDQEDEGEDNIIFWKSFPQNLRSLRIKDSDKMTSLPMGMQYLTSLQTLYLHHCYELNSLPEWISSLSSLQYLRIYYCPALKSLPEAMRNLTSLQTLGISDCPDLVKRCRKPNGKDYPKIQHIPKIIRG

SEQ ID NO: 101 - protein, 1161 aa, Spinacia oleracea
MAEIGYSVCSKLIEVMGSKIIKEICDMWGYNSHLDDLNKSVLTIKDVLLDAEAKRDLSREQQSYIAELKDVVYDADDLFDEFLTLAELKQIDGNNKGGGKFSKKVRRFFSSNKEKMGQAYKMSHMVKEIKKQLGEIVDRYTKFGFIVDYKPIIRRREETCSYFVGAKEIVGRDKDKDVIIGMLLDHDNDCSFLAVVGVGGVGKTTLAQLVYNDERVKSEFQDLRYWVCVSDQDGGQFDDKRILCKIIELVTGQIPPSNESMESVRKKFQEELGGKKYFLVLDDVWNEDRQKWLHLENFLKLGQGGSKIVVTTRSEKTANVIGKRQDYKLECLSAEDSWRLFEMSAFDEGHGQENYDELVTIGKKIVEKCYNNPLAITVVGSLLFGQEINKWRSFESSGLAQIANGDNQIFPILKLSYHNLPHSLKSCFSYCAVFPKDYEIKKEMLIDLWIAQGYIIPLDGGQSIEDAAEEHFVILLRRCFFQDVKKDSLGNVDYVKIHDLMHDVAQEVGKEEICVVTSGTKKLADKIRHVGCVVDRDPEIVFLCSNKIRSYISGRCIKNPVDSQIDNWMRLRVLDLSDSCVKDLSDSIGKLLHLRYLNLSSNIKLEIIPDAITRLHNLQTLLLKDCRSLKELPKDFCKLVKLRHLDLRGCQCLIGMPLGMDRLISLRVLPKVVVGKKEQSDDQLKALKGLTEIKGSIDITIYSKYRIVEGMNDTGGAGYLKSMKHLTGVDIRFDDREGGFVNPEAVLATLEPPSNIKSLSIHRFDGKTLPVWGRAEINWAISLSHLVDIQLWHCRNLQEMPVLSKLPHLKSLELTELDNLEYMESRSSSSSSDTEAATPELPTFFPSLEKLTLWGLEKLKGLGNRRSSSFPRLSKLEIWECPDLTSFPSCPSLEKLELKENNEALQIIVKITTTRGKEEKEEDKNAGVGNSQDDDNVKLWKVEIDNLGYLKSLPTNCLTHLDLTISDSKEGEGEWEVGDAFQKCVSSLRSLTIIGNHGINKVKRLSGRTGLEHFTLLESLKLSDIEDQEDEGEDNIIFWKSFPQNLRSLRIKDSDKMTSLPMGMQYLTSLQTLYLHHCYELNSLPEWISSLSSLQYLRIYYCPALKSLPEAMRNLTSLQTLGISDCPDLVKRCRKPNGKDYPKIQHIPKIRVVILIYSTLA

SEQ ID NO: 102 - DNA, 7116 bp, Spinacia oleracea
atggccgaaatcggatactcggtttgtgcgaaactcatcgaagtgattggcagtgagctgatcaaagagatttgtgacacatggggttacaaatctcttcttgaggacctcaacaaaactgtattgacggtcaggaacgttctcattcaagccggggtgatgcgggagcttactagtgaacaacaaggtttcattgcagaccttaaagatgttgtttatgatgctgatgacttgttcgacaagttactcactcgtgctgagcgaaaacagattgatggaaacgaaatctctgaaaaggtacgtcgtttcttttcctctagtaacaagatcggtcaagcttactacatgtctcgtaaggttaaggaaattaagaagcagttggatgaaattgttgataggcatacaaaatttgggtttagtgctgagtttatacctgtttgtaggggaaggggaaacgagagggaaacacgttcatatatagatgtcaagaatattcttgggagggataaagataagaatgatatcatagataggttgcttaatcgtaatggtaatgaagcttgtagtttcctgaccatagtgggagcgggaggattgggaaaaactgctcttgcacaacttgtgttcaatgatgaaagggtcaaaattgagttccatgatttgaggtattgggtttgtgtctctgatcaagatgggggccaatttgatgtgaaagaaatcctttgtaagattttagaggtggttactaaggagaaagttgataatagttccacattggaattggtacaaagccaatttcaagagaagttaagaggaaagaagtacttccttgttcttgatgatgtatggaacgaggatcgtgagaagtggcttcctttggaagagttgttaatgttgggtcaagggggaagcaaggttgtagtgaccacacgttcagagaagacagcaaatgtcatagggaaaagacatttttatacactggaatgtttgtcaccagattattcatggagcttatttgaaatgtcggcttttcagaaagggcatgagcaggaaaaccatcacgaactagttgatattgggaaaaagattgttgaaaaatgttataacaatccacttgctataacggtggtaggaagtcttctttatggagaggagataagtaagtggcggtcatttgaaatgagtgagttggccaaaattggcaatggggataataagattttgccgatattaaagctcagttaccataatcttataccctcgttgaagagttgttttagttattgtgcagtgtttcccaaggatcatgaaataaagaaggagatgttgattgaactttggatggcacaaggatatgttgtgccgttggatggaggtcaaagtatagaagatgctgccgaggaacattttgtaattttgttacgaaggtgtttctttcaagatgtaaagaaggataaatatggtgatgttgattctgttaaaatccacgacttgatgcacgatgtcgcccaagaagtggggagggaggaattatgtgtagtgaatgataatacaaagaacttgggtgataaaatccgtcatgtacatcgtgatgtcattagatatgcacaaagagtctctctgtgtagccatagccataagattcgttcgtatattggtggtaattgtgaaaaacgttgtgtggatacactaatagacaagtggatgtgtcttaggatgttggacttgtcaaggtcggatgttaaaaatttgcctaattcaataggtaaattgttgcacttgaggtatcttaacctgtcagataatagaaatctaaagatacttcctgatgcaattacaagactgcataatttgcagacactacttttagaacgttgcgaaagtttaaaggagttgccaaaagatttttgcaaattggtcaaactgagacacttggatttaaggggatgtttttctttgattggtatgccattgggaatggataggctaattagtcttagaatactaccaaacattgtggtgggtaggaaggaacaaagtgatgatgatgagctgaaagccctaaaaggcctcaccgagataaaaggctccattcgtattagaatctattcaaagtatagaatagttgaaggcatgaatgacacaggaggagctgggtatttaaagagcatgaaacatctcacgggggttgatattacatttgatggtggatgtgttaaccctgaagctgtgttggcaaccctagagccaccttcaaatatcaagaggttagagatgtggcattacagtggtacaacaattccagtatggggaagagcagagattaattgggcaatctccctctcacatcttgtcgacatccagctttggcattgtcgtaatttgcaggagatgccagtgctgagtaaactgcctcatttgaaatcactggaactttataatttgattagtttagagtacatggagagcacaagcagaagcagtagcagtgacacagaagcagcaacaccagaattaccaacattcttcccttcccttgaaaaacttacactttggcgtctggacaagttgaagggttttgggaacaggagatcgagtagttttccccgcctctctaaattggaaatctgggaatgcccagatctaacgtggtttcctccttgtccaagccttaaaacgttgaaattggaaaaaaacaatgaagcgttgcaaataatagtaaaaataacaacaacaagaggtaaagaagaaaaagaagaagacaagaatgctggtgttggaaattcacaagatgatgacaatgtcaaattacggaaggtggaaatagacaatgtgagttatctcaaatcactgcccacaaattgtcttactcacctcaaaataactggaatagattacagggagggggagattgaatcagattccgtggaggaggagattgaattggaagttggggaggcatttcagaagtgtgcatcttctttgagaagcctcatcataatcggaaatcacggaataaataaagtgatgagactgtctggaagaacagggttggagcatttcactctgttggactcactcgaactttcaaagatagaagaccaggaagatgagggcgaagacaacatcatattctggaaatcctttcctcaaaacctccgcagtttggaaattaaaggctcttgcaaaatgacaagtttgcccatggggatgcagtacttaacctccctccaaaccctcaaactagaaaattgtgatgaattgaattcccttccagaatggataagcagcttatcatctcttcaatacctgggcatattcaactgtccagccctagaatcactaccagaagcaatgcggaacctcacctcccttcagagacttgtgatacggctgtgtccagacctagttaaaagatgcggaaaacccaaaggcaaggactatcccaaaattcaacacatccccgaaattgtaagtgattgcagaaagtattttattcatttatatttattttatgcttagaatgatatacaccgtcgtcctttggtttcaaatcttgaatttggtttttgttttctttctttgtttctttattcaacaccagcccatttatgattgattcattaaaaaaaggatggagttttgtgtatttgaagaagacaacgaattgagattcctggggttttctttttgttggggttggatttcatgtatatgttgctgattaaatacgagactgatgatgatgatgatgtgtttatgggttttaaatcagattaaatatatgggaaatgtaagttaatttgggatgcacataaggtgtttgctgaaatgtctatgagaaatgttgtttcttggacttagaatgatatacactgtcgtccattggtttccaatcttacatttggtttgtgttttcttagtttgtttctttaatcaacaccaacccatttttttaaaactacctgcaactactaatttacgttgaccctgtatctcaggtactaaatgaatattggtgattttcagttactcaacactagcttgatcctgaacgcacccaaccttcaggttagaatccggcttactcatccttttgtccagttttcaagtaattgttttggcaggatcaattctctaattgttgtacaccgtatattgcaatttatagtgactacagttaatgaatgtttacaaaaaattagtcatgtaaaaacttcttctctgtccattacataaactctttttctctttctaacttatcatgttcatgtctaaaaaattaaacatgctcacatcaatgttcatttaagctaacttacttctgtaagagagcgagctagttaaaaactcctttaactttctgttttatactcaggacatggattgatgcaagcatgaagaacttcgggaatttgctaaaactctaccaaagcgatgagagtttggactttgtttcacttgaagtcagggactgtcaacaaagccacagtgtgcatgttggctgtttcacttggacgataaaaaggtttatttaattgttttcctaagtgtatttggcttacaagcttttacttttcgcttgaaagggtttttcttgttttaagctttttgaattagagtttcggttgaagtaagagtagtcgtattagtcttttactttgcaggagtctatgcctatataaggtaagactcgtatttgtaattttcagattatgcaattcaagttttcgagtgttttcttaaaaaaacatatcatacctgtgtgtagcataaagataaattctgatgctgtgcttcttgttatggctcacattggttttcattgtttggattgtttcacagggaagcagagaatacctggaacctgtaaaggacgctatatctatagcagctttcacaggccaagtaatataatgttctttatcaatcactcaatacctggagattgtttgaacacataattcacctctttttttccatctcaaattgcagacttttactgggatttgaatgacagcaaacatttgattgtcacgaggattgatctaactggtgaatgttgtgatcaccatattggtctttctcattcaaacaaacttgcataccgttcttttgaagtttgaagacaagcaggcgataatcaactcaggtcgaagctcatgtgcaggagagaatagaatatagaggagattatttttaaaagaaacgctcaaaggtattgtagcacctttcctatttgctactgcagtgatgtttttatttcttgtttgcagcgcttgtttctcatatttcaacctacttttagaaaaaaaaacatctccgaacataaccaaaaataaagttcccttatcagtgctttccctgctttcttctaaacaacatatacaattataaaccctttttctctcttacctttgttattcttccttgcttcattgagataacactctcctgtttttgttttgttgttagtcattacatggatatatcaaggacaacagttctgtagtccgtcaactgtggttaggaaggctaaactggagcacaataaccccatgtcaattgaatagtaaaggtgtgctatatcagtttcgtttggcttggcttacctgaaaaatggctggttatttatccttgtctctttctatgacgtgcagtggcttgttaatgtgtctcggacaacaattcctcactttccaagttccatacacgctgatgtaactatcttctgcagtctgttctttcatttttgccacgtgctctaattataactttttgtactcaataatcaactccttgtcccggtatttgcagagactacttaaacaggtaaagtgacaatcctggcgaagttgtctgtttcttagctctgaacccatcattcaggtaagattaagtatttaagaagaaattttgtttttacctaaaatgaatgatcttgtgtaactgcttgcttcttgcattaaataagaactttctgctgcatatgtgacagttacatccacaaaaaagttggaggtttgttcagggattggaaatgaaggtacttcagaattcctggaatgtttatgaatgctccagacttcagagtctttaatggaaaattcgagtcactaaaaaaacattattcctatcatcagagctttgaagttcctctatacaaggtcaactgagttcctctttgcctcttgtttaattgtatttacttgtaccttaattataatctgtatattgttttagttaagttctaaaacaggttattattcatcatttgtgcagcatattgctggaatcaagaatctagtgcttcttcttcctgacttcactgtcaaaatagcagttcccatgctggaaataagcgcgctagcaatgtaattgatgacatggatgttgctgcttctgagttttgatcataaaaagctgttatgtgtttcttgaatgtaatgaaggagaggagaaaactgaaaactcttggcaaaaacgtgaaattgcagtgcctcggggtggtagggatcacccggattcagttcagacgatacttttttcaacccggtttgttccggttttcagcttcgggttttccttgtacttttggggcacacatacaaggctacttcatgtttgagaaacctaattgaggctatcttgtagcaaatgcacaccacactctttctctcttctctccttttttcaccttccatttgtaaaaatcctcttttaaaggttaataaaaaaaagcttcaagtctcgtagggtggatgtaggtcacattgaccgaaccacggtaaactctttgtgttctttcttctctctttgtttctcatttttacggcaagtgtttatggttaaccatgcatcttagaatagcttaaggcattaacataataacatcaatgttctccaaagattcaccttacttgttgtacataatcacaatgttaagcctatgaaggtagaatgctctcatgatttggtttaaccaaaaaataaactctaaaataatacggagtaataaaaattggccataaattatttacaaagtttgatttttgtatagggtatcttgtacttgtgataaaaaaaattaaaaaaaaaaaaattacttatttcttc

SEQ ID NO: 103 - DNA, 2000 bp, Spinacia oleracea
tttgaagttaggcttaacttgctcaccaattcttaaatagactcgacttacactgaatttattgtgtactatgtctagaaagtaaggtcaacaactttcttctaaattattttggcatgtttattagggttattatgaaaaacatatcaaattggtgttgttagttaggcttgaataatatgattttaagtcacgagacttttataaattaggtaatttgatttaaaaaattgttacatatctaagaaaatggatgttaaatttatcagtcaatgtataaacaataaaagtcaatatgtatgtaaaagggttgctagataaaatctttggttttttggtccacaactccacactaagaggaactccaatgcttagttacaaggtggtgtagttaaaaagtaactccaatagttaactacacggtattatagttaaatttgccaactcaaatttctaactacaatatatttaagctacaaagtttctcattggctgactacaatacgttgtagcgccttataatattttattcaatatacaattttatttattttacctttttaacaatttttttttgatctacctgctgtcctgttcatatgagctacactaatttgatagctgcttacgcaattcttatatcaacggttggctacttgttcaaatatttttatttttttacgagtaagtcattttatgatcattgaagtggctctattattattatcatgcaccgattaacgcaagaataattaactcggtacgaattagtttcaaaataaaatccctcaaaaaaaaaagtttcaaaataaaattaacagaaaaccaaccttctccggtttactgttgttagagcatggaattttccagtaatcgcagaccccaaattatcttccagttgaatcaatccttgatttttggatttgccagaaaactccttgaattttagggttcatatttgatccgtaattgggaaaattttcagcaattgatcttccaaatcagccctacttgtttccagactgcaaatgaaaggtgcgaactttatactgcattttggttttccattagtgtaatttattaagatgaactgcattttgcaattgttttattcgactactcatttttaaatcaaattgcttaattgctagttagttttcttatcatattgccaaaaaaaattatttttgtttaattggtgaaaaagggtaaattatacctagtgtacaagattttcttgcacaccaccgttaatttgttgacacatcatcaaacgtactgaaaaatgagaatgaaagacaataaatatgtcattttaaccaatagaaaaacatgatgtagtaagatccttaattgatagataaataattaaatatcagtccattagttgaatattcaatgaaaatgtatggtccaaaaatggcgtttaatagtcaatgtcatgctttatggggtggtggagtactatgtgactgtgtgtggacttggagaagactagagagtatgattatcaacctatggaccctcaaaatgaaaatgaaaatgatgtttacacgtgctatttgcacggacttcaatgcaaatagtataaatttacggtcaaagttttcattctaaagcgtaaataactttcatgaatggaggacggtagtataagtataacgttatagcctacaattttcttatcatattcatataaatttgtttctaaaagttgttttacttggctaaaatacttttgttcttattggcagataaacatcagtacgtccattattggccaacttgctgagtccattattggccaacttgaacatatacctccaaacaataatcaataatgtcgattatgaagtttgtgaatgcaatttattatcactttcatttataaaatgactacttgattaacacatacaatattacctttctccaaacaccctttcaattctgcttaatcttgttttctcatcatctcttcatctttctgaaaacacaaccca

SEQ ID NO: 104 - DNA, 3492 bp, Spinacia oleracea
atggccgaaatcggatactcggtttgtgcgaaactcatcgaagtgattggcagtgagctgatcaaagagatttgtgacacatggggttacaaatctcttcttgaggacctcaacaaaactgtattgacggtcaggaacgttctcattcaagccggggtgatgcgggagcttactagtgaacaacaaggtttcattgcagaccttaaagatgttgtttatgatgctgatgacttgttcgacaagttactcactcgtgctgagcgaaaacagattgatggaaacgaaatctctgaaaaggtacgtcgtttcttttcctctagtaacaagatcggtcaagcttactacatgtctcgtaaggttaaggaaattaagaagcagttggatgaaattgttgataggcatacaaaatttgggtttagtgctgagtttatacctgtttgtaggggaaggggaaacgagagggaaacacgttcatatatagatgtcaagaatattcttgggagggataaagataagaatgatatcatagataggttgcttaatcgtaatggtaatgaagcttgtagtttcctgaccatagtgggagcgggaggattgggaaaaactgctcttgcacaacttgtgttcaatgatgaaagggtcaaaattgagttccatgatttgaggtattgggtttgtgtctctgatcaagatgggggccaatttgatgtgaaagaaatcctttgtaagattttagaggtggttactaaggagaaagttgataatagttccacattggaattggtacaaagccaatttcaagagaagttaagaggaaagaagtacttccttgttcttgatgatgtatggaacgaggatcgtgagaagtggcttcctttggaagagttgttaatgttgggtcaagggggaagcaaggttgtagtgaccacacgttcagagaagacagcaaatgtcatagggaaaagacatttttatacactggaatgtttgtcaccagattattcatggagcttatttgaaatgtcggcttttcagaaagggcatgagcaggaaaaccatcacgaactagttgatattgggaaaaagattgttgaaaaatgttataacaatccacttgctataacggtggtaggaagtcttctttatggagaggagataagtaagtggcggtcatttgaaatgagtgagttggccaaaattggcaatggggataataagattttgccgatattaaagctcagttaccataatcttataccctcgttgaagagttgttttagttattgtgcagtgtttcccaaggatcatgaaataaagaaggagatgttgattgaactttggatggcacaaggatatgttgtgccgttggatggaggtcaaagtatagaagatgctgccgaggaacattttgtaattttgttacgaaggtgtttctttcaagatgtaaagaaggataaatatggtgatgttgattctgttaaaatccacgacttgatgcacgatgtcgcccaagaagtggggagggaggaattatgtgtagtgaatgataatacaaagaacttgggtgataaaatccgtcatgtacatcgtgatgtcattagatatgcacaaagagtctctctgtgtagccatagccataagattcgttcgtatattggtggtaattgtgaaaaacgttgtgtggatacactaatagacaagtggatgtgtcttaggatgttggacttgtcaaggtcggatgttaaaaatttgcctaattcaataggtaaattgttgcacttgaggtatcttaacctgtcagataatagaaatctaaagatacttcctgatgcaattacaagactgcataatttgcagacactacttttagaacgttgcgaaagtttaaaggagttgccaaaagatttttgcaaattggtcaaactgagacacttggatttaaggggatgtttttctttgattggtatgccattgggaatggataggctaattagtcttagaatactaccaaacattgtggtgggtaggaaggaacaaagtgatgatgatgagctgaaagccctaaaaggcctcaccgagataaaaggctccattcgtattagaatctattcaaagtatagaatagttgaaggcatgaatgacacaggaggagctgggtatttaaagagcatgaaacatctcacgggggttgatattacatttgatggtggatgtgttaaccctgaagctgtgttggcaaccctagagccaccttcaaatatcaagaggttagagatgtggcattacagtggtacaacaattccagtatggggaagagcagagattaattgggcaatctccctctcacatcttgtcgacatccagctttggcattgtcgtaatttgcaggagatgccagtgctgagtaaactgcctcatttgaaatcactggaactttataatttgattagtttagagtacatggagagcacaagcagaagcagtagcagtgacacagaagcagcaacaccagaattaccaacattcttcccttcccttgaaaaacttacactttggcgtctggacaagttgaagggttttgggaacaggagatcgagtagttttccccgcctctctaaattggaaatctgggaatgcccagatctaacgtggtttcctccttgtccaagccttaaaacgttgaaattggaaaaaaacaatgaagcgttgcaaataatagtaaaaataacaacaacaagaggtaaagaagaaaaagaagaagacaagaatgctggtgttggaaattcacaagatgatgacaatgtcaaattacggaaggtggaaatagacaatgtgagttatctcaaatcactgcccacaaattgtcttactcacctcaaaataactggaatagattacagggagggggagattgaatcagattccgtggaggaggagattgaattggaagttggggaggcatttcagaagtgtgcatcttctttgagaagcctcatcataatcggaaatcacggaataaataaagtgatgagactgtctggaagaacagggttggagcatttcactctgttggactcactcgaactttcaaagatagaagaccaggaagatgagggcgaagacaacatcatattctggaaatcctttcctcaaaacctccgcagtttggaaattaaaggctcttgcaaaatgacaagtttgcccatggggatgcagtacttaacctccctccaaaccctcaaactagaaaattgtgatgaattgaattcccttccagaatggataagcagcttatcatctcttcaatacctgggcatattcaactgtccagccctagaatcactaccagaagcaatgcggaacctcacctcccttcagagacttgtgatacggctgtgtccagacctagttaaaagatgcggaaaacccaaaggcaaggactatcccaaaattcaacacatccccgaaattgtactaaatgaatattggtga

SEQ ID NO: 105 - DNA, 3525 bp, Spinacia oleracea
atggccgaaatcggatactcggtttgtgcgaaactcatcgaagtgattggcagtgagctgatcaaagagatttgtgacacatggggttacaaatctcttcttgaggacctcaacaaaactgtattgacggtcaggaacgttctcattcaagccggggtgatgcgggagcttactagtgaacaacaaggtttcattgcagaccttaaagatgttgtttatgatgctgatgacttgttcgacaagttactcactcgtgctgagcgaaaacagattgatggaaacgaaatctctgaaaaggtacgtcgtttcttttcctctagtaacaagatcggtcaagcttactacatgtctcgtaaggttaaggaaattaagaagcagttggatgaaattgttgataggcatacaaaatttgggtttagtgctgagtttatacctgtttgtaggggaaggggaaacgagagggaaacacgttcatatatagatgtcaagaatattcttgggagggataaagataagaatgatatcatagataggttgcttaatcgtaatggtaatgaagcttgtagtttcctgaccatagtgggagcgggaggattgggaaaaactgctcttgcacaacttgtgttcaatgatgaaagggtcaaaattgagttccatgatttgaggtattgggtttgtgtctctgatcaagatgggggccaatttgatgtgaaagaaatcctttgtaagattttagaggtggttactaaggagaaagttgataatagttccacattggaattggtacaaagccaatttcaagagaagttaagaggaaagaagtacttccttgttcttgatgatgtatggaacgaggatcgtgagaagtggcttcctttggaagagttgttaatgttgggtcaagggggaagcaaggttgtagtgaccacacgttcagagaagacagcaaatgtcatagggaaaagacatttttatacactggaatgtttgtcaccagattattcatggagcttatttgaaatgtcggcttttcagaaagggcatgagcaggaaaaccatcacgaactagttgatattgggaaaaagattgttgaaaaatgttataacaatccacttgctataacggtggtaggaagtcttctttatggagaggagataagtaagtggcggtcatttgaaatgagtgagttggccaaaattggcaatggggataataagattttgccgatattaaagctcagttaccataatcttataccctcgttgaagagttgttttagttattgtgcagtgtttcccaaggatcatgaaataaagaaggagatgttgattgaactttggatggcacaaggatatgttgtgccgttggatggaggtcaaagtatagaagatgctgccgaggaacattttgtaattttgttacgaaggtgtttctttcaagatgtaaagaaggataaatatggtgatgttgattctgttaaaatccacgacttgatgcacgatgtcgcccaagaagtggggagggaggaattatgtgtagtgaatgataatacaaagaacttgggtgataaaatccgtcatgtacatcgtgatgtcattagatatgcacaaagagtctctctgtgtagccatagccataagattcgttcgtatattggtggtaattgtgaaaaacgttgtgtggatacactaatagacaagtggatgtgtcttaggatgttggacttgtcaaggtcggatgttaaaaatttgcctaattcaataggtaaattgttgcacttgaggtatcttaacctgtcagataatagaaatctaaagatacttcctgatgcaattacaagactgcataatttgcagacactacttttagaacgttgcgaaagtttaaaggagttgccaaaagatttttgcaaattggtcaaactgagacacttggatttaaggggatgtttttctttgattggtatgccattgggaatggataggctaattagtcttagaatactaccaaacattgtggtgggtaggaaggaacaaagtgatgatgatgagctgaaagccctaaaaggcctcaccgagataaaaggctccattcgtattagaatctattcaaagtatagaatagttgaaggcatgaatgacacaggaggagctgggtatttaaagagcatgaaacatctcacgggggttgatattacatttgatggtggatgtgttaaccctgaagctgtgttggcaaccctagagccaccttcaaatatcaagaggttagagatgtggcattacagtggtacaacaattccagtatggggaagagcagagattaattgggcaatctccctctcacatcttgtcgacatccagctttggcattgtcgtaatttgcaggagatgccagtgctgagtaaactgcctcatttgaaatcactggaactttataatttgattagtttagagtacatggagagcacaagcagaagcagtagcagtgacacagaagcagcaacaccagaattaccaacattcttcccttcccttgaaaaacttacactttggcgtctggacaagttgaagggttttgggaacaggagatcgagtagttttccccgcctctctaaattggaaatctgggaatgcccagatctaacgtggtttcctccttgtccaagccttaaaacgttgaaattggaaaaaaacaatgaagcgttgcaaataatagtaaaaataacaacaacaagaggtaaagaagaaaaagaagaagacaagaatgctggtgttggaaattcacaagatgatgacaatgtcaaattacggaaggtggaaatagacaatgtgagttatctcaaatcactgcccacaaattgtcttactcacctcaaaataactggaatagattacagggagggggagattgaatcagattccgtggaggaggagattgaattggaagttggggaggcatttcagaagtgtgcatcttctttgagaagcctcatcataatcggaaatcacggaataaataaagtgatgagactgtctggaagaacagggttggagcatttcactctgttggactcactcgaactttcaaagatagaagaccaggaagatgagggcgaagacaacatcatattctggaaatcctttcctcaaaacctccgcagtttggaaattaaaggctcttgcaaaatgacaagtttgcccatggggatgcagtacttaacctccctccaaaccctcaaactagaaaattgtgatgaattgaattcccttccagaatggataagcagcttatcatctcttcaatacctgggcatattcaactgtccagccctagaatcactaccagaagcaatgcggaacctcacctcccttcagagacttgtgatacggctgtgtccagacctagttaaaagatgcggaaaacccaaaggcaaggactatcccaaaattcaacacatccccgaaattttactcaacactagcttgatcctgaacgcacccaaccttcaggacatggattga

SEQ ID NO: 106 - protein, 1163 aa, Spinacia oleracea
MAEIGYSVCAKLIEVIGSELIKEICDTWGYKSLLEDLNKTVLTVRNVLIQAGVMRELTSEQQGFIADLKDVVYDADDLFDKLLTRAERKQIDGNEISEKVRRFFSSSNKIGQAYYMSRKVKEIKKQLDEIVDRHTKFGFSAEFIPVCRGRGNERETRSYIDVKNILGRDKDKNDIIDRLLNRNGNEACSFLTIVGAGGLGKTALAQLVFNDERVKIEFHDLRYWVCVSDQDGGQFDVKEILCKILEVVTKEKVDNSSTLELVQSQFQEKLRGKKYFLVLDDVWNEDREKWLPLEELLMLGQGGSKVVVTTRSEKTANVIGKRHFYTLECLSPDYSWSLFEMSAFQKGHEQENHHELVDIGKKIVEKCYNNPLAITVVGSLLYGEEISKWRSFEMSELAKIGNGDNKILPILKLSYHNLIPSLKSCFSYCAVFPKDHEIKKEMLIELWMAQGYVVPLDGGQSIEDAAEEHFVILLRRCFFQDVKKDKYGDVDSVKIHDLMHDVAQEVGREELCVVNDNTKNLGDKIRHVHRDVIRYAQRVSLCSHSHKIRSYIGGNCEKRCVDTLIDKWMCLRMLDLSRSDVKNLPNSIGKLLHLRYLNLSDNRNLKILPDAITRLHNLQTLLLERCESLKELPKDFCKLVKLRHLDLRGCFSLIGMPLGMDRLISLRILPNIVVGRKEQSDDDELKALKGLTEIKGSIRIRIYSKYRIVEGMNDTGGAGYLKSMKHLTGVDITFDGGCVNPEAVLATLEPPSNIKRLEMWHYSGTTIPVWGRAEINWAISLSHLVDIQLWHCRNLQEMPVLSKLPHLKSLELYNLISLEYMESTSRSSSSDTEAATPELPTFFPSLEKLTLWRLDKLKGFGNRRSSSFPRLSKLEIWECPDLTWFPPCPSLKTLKLEKNNEALQIIVKITTTRGKEEKEEDKNAGVGNSQDDDNVKLRKVEIDNVSYLKSLPTNCLTHLKITGIDYREGEIESDSVEEEIELEVGEAFQKCASSLRSLIIIGNHGINKVMRLSGRTGLEHFTLLDSLELSKIEDQEDEGEDNIIFWKSFPQNLRSLEIKGSCKMTSLPMGMQYLTSLQTLKLENCDELNSLPEWISSLSSLQYLGIFNCPALESLPEAMRNLTSLQRLVIRLCPDLVKRCGKPKGKDYPKIQHIPEIVLNEYW

SEQ ID NO: 107 - protein, 1174 aa, Spinacia oleracea
MAEIGYSVCAKLIEVIGSELIKEICDTWGYKSLLEDLNKTVLTVRNVLIQAGVMRELTSEQQGFIADLKDVVYDADDLFDKLLTRAERKQIDGNEISEKVRRFFSSSNKIGQAYYMSRKVKEIKKQLDEIVDRHTKFGFSAEFIPVCRGRGNERETRSYIDVKNILGRDKDKNDIIDRLLNRNGNEACSFLTIVGAGGLGKTALAQLVFNDERVKIEFHDLRYWVCVSDQDGGQFDVKEILCKILEVVTKEKVDNSSTLELVQSQFQEKLRGKKYFLVLDDVWNEDREKWLPLEELLMLGQGGSKVVVTTRSEKTANVIGKRHFYTLECLSPDYSWSLFEMSAFQKGHEQENHHELVDIGKKIVEKCYNNPLAITVVGSLLYGEEISKWRSFEMSELAKIGNGDNKILPILKLSYHNLIPSLKSCFSYCAVFPKDHEIKKEMLIELWMAQGYVVPLDGGQSIEDAAEEHFVILLRRCFFQDVKKDKYGDVDSVKIHDLMHDVAQEVGREELCVVNDNTKNLGDKIRHVHRDVIRYAQRVSLCSHSHKIRSYIGGNCEKRCVDTLIDKWMCLRMLDLSRSDVKNLPNSIGKLLHLRYLNLSDNRNLKILPDAITRLHNLQTLLLERCESLKELPKDFCKLVKLRHLDLRGCFSLIGMPLGMDRLISLRILPNIVVGRKEQSDDDELKALKGLTEIKGSIRIRIYSKYRIVEGMNDTGGAGYLKSMKHLTGVDITFDGGCVNPEAVLATLEPPSNIKRLEMWHYSGTTIPVWGRAEINWAISLSHLVDIQLWHCRNLQEMPVLSKLPHLKSLELYNLISLEYMESTSRSSSSDTEAATPELPTFFPSLEKLTLWRLDKLKGFGNRRSSSFPRLSKLEIWECPDLTWFPPCPSLKTLKLEKNNEALQIIVKITTTRGKEEKEEDKNAGVGNSQDDDNVKLRKVEIDNVSYLKSLPTNCLTHLKITGIDYREGEIESDSVEEEIELEVGEAFQKCASSLRSLIIIGNHGINKVMRLSGRTGLEHFTLLDSLELSKIEDQEDEGEDNIIFWKSFPQNLRSLEIKGSCKMTSLPMGMQYLTSLQTLKLENCDELNSLPEWISSLSSLQYLGIFNCPALESLPEAMRNLTSLQRLVIRLCPDLVKRCGKPKGKDYPKIQHIPEILLNTSLILNAPNLQDMD

SEQ ID NO: 108 - DNA, 1597 bp, Spinacia oleracea
tcacgtgggttgtgttgtcgatagagatccagaaatagtctttttatgtagcaataagattcgttcgtatattagcggtcgctgcataaagaatccggtggattcacaaatagacaactggatgtgccttagggtgttggacttgtcagattcatgtgttaaagatttgtctgattcaataggtaagctgctgcacttaaggtatcttaacctctcttctaatataaagttggagataatccctgatgcaattacaagactgcataacttgcagacactacttttagaagattgcagaagtttaaaggagttgccaaaagatttttgcaaattggtcaaactgaggcacttggaattacagggttgtcatgatttgattggtatgtcatttggaatggataagctaactagtcttagaatactaccaaacattgtggtgggtaggaaggaacaaagtgttgatgatgagctgaaagccctaaaaggcctcaccgagataaaaggctccattgatatcacaatctattcaaaatatagaagagttgaaggcatgaatggcacaggaggaggagctgggtatttgaagagcatgaaacatctcacgggggttaatattacatttgatgaaggtggatgtgttaaccctgaagctgtgtatttgaagagcatgaaacatctcacgagggttattattatatttgattataaaggtggatgtgttaaccctgaagctgtgttggcaaccctagagccaccttcaaatatcaagaggttagagatgtggcattacagtggtacaacaattccagtatggggaagagcagagattaattgggcaatctccctctcacatcttgtcgacatcacgcttgaagattgttacaatttgcaggagatgccagtgctgagtaaactgcctcatttgaaatcactggaacttacagagttggataacttagagtacatggagagtagaagcagcagcagtagcagtgacacagaagcagcaacaccagaattaccaacattcttcccttcccttgaaaaacttacactttggcgtctggacaagttgaagggttttgggaacaggagatcgagtagttttccccgcctctctaaattggaaatctggaaatgtccagatctaacgtcatttccttcttgtccaagccttgaagagttggaattgaaagaaaacaatgaagcgttgcaaataatagtaaaaataacaacaacaagaggtaaagaagaaaaagaagaagacaagaatgctggtgttggaaattcacaagatgatgacaatgtcaaattatggaaggtggaaatagacaatctgggttatctcaaatcactgcccacaaattgtctgactcacctcgaccttacaataagtgattccaaggagggggagggtgaatgggaagttggggatgcatttcagaagtgtgtatcttctttgagaagcctcaccataatcggaaatcacggaataaataaagtgaagagactgtctggaagaacagggttggagcatttcactctgttggaatcactcaaactttcagatatagaagaccaggaagatgagggcgaa

SEQ ID NO: 109 - protein, 532 aa, Spinacia oleracea
HVGCVVDRDPEIVFLCSNKIRSYISGRCIKNPVDSQIDNWMCLRVLDLSDSCVKDLSDSIGKLLHLRYLNLSSNIKLEIIPDAITRLHNLQTLLLEDCRSLKELPKDFCKLVKLRHLELQGCHDLIGMSFGMDKLTSLRILPNIVVGRKEQSVDDELKALKGLTEIKGSIDITIYSKYRRVEGMNGTGGGAGYLKSMKHLTGVNITFDEGGCVNPEAVYLKSMKHLTRVIIIFDYKGGCVNPEAVLATLEPPSNIKRLEMWHYSGTTIPVWGRAEINWAISLSHLVDITLEDCYNLQEMPVLSKLPHLKSLELTELDNLEYMESRSSSSSSDTEAATPELPTFFPSLEKLTLWRLDKLKGFGNRRSSSFPRLSKLEIWKCPDLTSFPSCPSLEELELKENNEALQIIVKITTTRGKEEKEEDKNAGVGNSQDDDNVKLWKVEIDNLGYLKSLPTNCLTHLDLTISDSKEGEGEWEVGDAFQKCVSSLRSLTIIGNHGINKVKRLSGRTGLEHFTLLESLKLSDIEDQEDEGE

SEQ ID NO: 110 - DNA, 2180 bp, Spinacia oleracea
acaagtggatgtgtcttaggatgttggacttgtcatggtcggatgttaaaaatttgcctaattcaataggtaaattgttgcacttgaggtatcttaacctgtcagataatagaaatctaaagatacttcctgatgcaattacaagactgcataatttgcagacactacttttagaagattgcagaagtttaaaggagttgccaaaagatttttgcaaattggtcaaactgaggcacttggaattacagggttgtcatgatttgattggtatgccatttggaatggataagctaactagtcttagaatactaccaaacattgtggtgggtaggaaggaacaaagtgatgatgagctgaaagccctaaaaggcctcaccgagataaaaggctccatttctatcagaatctattcaaagtatagaatagttgaaggcatgaatgacacaggaggagctgcttatttgaagagcatgaaacatctcagggagattgatattacatttttgggtgaatgtgttggccctgaagctgtattggaaaccttagagccaccttcaaatatcaagagcttatatatatataattacagtggtacaacaattccagtatggggaagagcagagattaattgggcaatctccctctcacatctcgtcgacatccagcttagttgttgtagtaatttgcaggagatgccagtgctgagtaaactgcctcatttgaaatcgctgaaacttggatggttggataacttagagtacatggagagtagcagtagcagtgacacagaagcagcaacaccagaattaccaacattcttcccttcccttgaaaaacttactttacagcatctggaaaagttgaagggttttgggaacaggagatcgagtagttttccccgcctctctgaattggaaatcaagaaatgcccagatctaacgtcatttccttcttgtccaagccttgagaagttggaattgaaagaaagcaatgaagcattgcaaataatagtaaaaataacaacaagaggtaaagaaaaagaagagaacaataatgctggtgttagaaattcacaagatgatgacaaagtcaaattacggaagatggtgatagacaatctgggttatctcacgggggttgatattagatttgatgatagagaaggtggatttgttaaccctgaagctgtgttggcaaccctagagccaccttcaaatatcaagagcttatctatacatcgttttgatggtaaaacacttccagtatggggaagagcagagattaattgggcaatctccctctcacatcttgtcgacatccagctttggcattgtcgtaatttgcaggagatgccagtgctgagtaaactgcctcatttgaaatcactggaactttataatttgattagtttagagtacatggagagcacaagcagaagcagtagcagtgacacagaagcagcaacaccagaattaccaacattcttcccttcccttgaaaaacttacactttggggtctggaaaagttgaagggtttggggaacaggagatcgagtagttttccccgcctctctgaattgaaaatcatggaatgcccagatctaacgtggtttcctccctgtccaagccttgaaaaacttacactttggcgtctggacaagttgaagggttttgggaaccggagatcgagtacttttccccgcctctctgaattggaaatcaagaaatgcccagatctaacgtcatttccttcttgtccaagccttgagaagttggaattgaaagaaagcaatgaagcattgcaaataatagtaaaaataacaacaagaggtaaagaaaaagaagagaacaataatgctggtgttagaaattcacaagatgatgacaaagtcaaattacggaagatggtgatagacaatctgggttatctcaaatcactgcccacaaattgtcttactcacctcgaccttacaataagtgattccaaggagggggagggtgaatgggaagttggggatgcatttcagaagtgtgtatcttctttgagaagcctcaccataatcggaaatcacggaataaataaagtgaagagactgtctggaagaacagggttggagcatttcactctgttggaatcactcaaactttcagatatagaagaccaggaagatgagggcgaa

SEQ ID NO: 111 - protein, 726 aa, Spinacia oleracea
KWMCLRMLDLSWSDVKNLPNSIGKLLHLRYLNLSDNRNLKILPDAITRLHNLQTLLLEDCRSLKELPKDFCKLVKLRHLELQGCHDLIGMPFGMDKLTSLRILPNIVVGRKEQSDDELKALKGLTEIKGSISIRIYSKYRIVEGMNDTGGAAYLKSMKHLREIDITFLGECVGPEAVLETLEPPSNIKSLYIYNYSGTTIPVWGRAEINWAISLSHLVDIQLSCCSNLQEMPVLSKLPHLKSLKLGWLDNLEYMESSSSSDTEAATPELPTFFPSLEKLTLQHLEKLKGFGNRRSSSFPRLSELEIKKCPDLTSFPSCPSLEKLELKESNEALQIIVKITTRGKEKEENNNAGVRNSQDDDKVKLRKMVIDNLGYLTGVDIRFDDREGGFVNPEAVLATLEPPSNIKSLSIHRFDGKTLPVWGRAEINWAISLSHLVDIQLWHCRNLQEMPVLSKLPHLKSLELYNLISLEYMESTSRSSSSDTEAATPELPTFFPSLEKLTLWGLEKLKGLGNRRSSSFPRLSELKIMECPDLTWFPPCPSLEKLTLWRLDKLKGFGNRRSSTFPRLSELEIKKCPDLTSFPSCPSLEKLELKESNEALQIIVKITTRGKEKEENNNAGVRNSQDDDKVKLRKMVIDNLGYLKSLPTNCLTHLDLTISDSKEGEGEWEVGDAFQKCVSSLRSLTIIGNHGINKVKRLSGRTGLEHFTLLESLKLSDIEDQEDEGE

SEQ ID NO: 112 - DNA, 1391 bp, Spinacia oleracea
acaagtggatgtgtcttaggatgttggacttgtcaaggtcggatgttaaaaatttgcctaattcaataggtaaattgttgcacttgaggtgtcttaacctgtcttataatgatctgttgatactccctgatgcaattacaagactgcataatttgcagacactgcttttaaaagattgcggaagtttaatggagttgccaaaagatttttgcaaattggtcaaactgagacacttggatttaagggattgtgatgatttgattggtatgccattgggaatggataggctaactagtcttagagtactgccattctttgtggtgggtaggaaggaacaaagtgttgacgatgagctgaaagccctaaaaggcctcaccgagataaaaggctccattgatatcacaatctattcaaagtatagaatagttgaaggcatgaatgacacaggagctgggtatttgaagagcatgaaacatctcagggagattggtattacatttgatggtggatgtgttaaccctgaagctgtgttggaaaccctagagccaccttcaaatatcaagagcttatctatagataattacgatggtacaacaattccagtatggggaagagcagagattaattgggcaatctccctctcacatcttgtcgacatttggttttgtggttgtagtaatttgcaggagatgccagtgctgagtaaactgcctcatttgaaatcactgtatctttttatgttttgtaagttagagtacatggagagtagaagcagcagcagtagcagtgacacagaagcagcaacaccagaattaccaacattcttcccttcccttgaaaaacttacactttggtatctggaaaagttgaagggtttggggaacaggagatcgagtagttttccccgcctctctaaattggaaatcaatgaatgcccagatctaacgtggtttcctccttgtccaagccttgaaacgttgaaattggtaaaaaacaatgaagcgttgcaaataatagtaaaaataacaacaacaagaggtaaagaagaaaaagaagaagacaagaatgctggtgttggaaattcacaagatgatgacaatgtcaaattatggaaggtggaaatagacaatcaatgttatctcaaatcactgcccacaaattgtcttactcacctcaacataaaagtaagagattccgaaggggaggagattgaattggaagttggggaggcatttcagaagtgtgcatcttctttgagaagcctcatcataatcggaaatcacggaataaataaagtgatgagactgtctggaagaacagggttggagcatttcactctgttggactcactcaaattttcatatatagaagaccaggaagatgagggcgaa

SEQ ID NO: 113 - protein, 463 aa, Spinacia oleracea
KWMCLRMLDLSRSDVKNLPNSIGKLLHLRCLNLSYNDLLILPDAITRLHNLQTLLLKDCGSLMELPKDFCKLVKLRHLDLRDCDDLIGMPLGMDRLTSLRVLPFFVVGRKEQSVDDELKALKGLTEIKGSIDITIYSKYRIVEGMNDTGAGYLKSMKHLREIGITFDGGCVNPEAVLETLEPPSNIKSLSIDNYDGTTIPVWGRAEINWAISLSHLVDIWFCGCSNLQEMPVLSKLPHLKSLYLFMFCKLEYMESRSSSSSSDTEAATPELPTFFPSLEKLTLWYLEKLKGLGNRRSSSFPRLSKLEINECPDLTWFPPCPSLETLKLVKNNEALQIIVKITTTRGKEEKEEDKNAGVGNSQDDDNVKLWKVEIDNQCYLKSLPTNCLTHLNIKVRDSEGEEIELEVGEAFQKCASSLRSLIIIGNHGINKVMRLSGRTGLEHFTLLDSLKFSYIEDQEDEGE

SEQ ID NO: 114 - DNA, 1516 bp, Spinacia oleracea
tcacgtgggttgtgttgtcgatagagatccagaaatagtctttttatgtagcaataagattcgttcgtatattagcggtcgttgtataaagaatccggtggattcacaaatagacaactggatgcgccttagggtgttggacttgtcagattcatgtgttaaagatttgtctgattcaataggtaagctgctgcacttaaggtatcttaacctctcttctaatataaagttggagataatccctgatgcaattacaagactgcataacttgcagacactacttttagaatattgcagaagtttaaaggagttgccaaaagatttttgcaaattggtcaaactgagacacttggatttaaggggttgtcagtgtttgattggtatgccattgggaatggataggctaattagtcttagagtactaccaaaagttgtggtgggtaagaaggaacaaagtgatgatcagctgaaagccctaaaaggcctcaccgagataaaaggctccattgatatcacaatctattcaaagtatagaatagttgaaggcatgaatgacacaggaggagctgggtatttgaagagcatgaaacatctcacgggggttgatattagatttgatgatagagaaggtggatgtgttaaccctgaagctgtgttggcaaccctagagccaccttcaaatatcaagaggttagagatgtggcattacagtggtacaacaattccagtatggggaagagcagagattaattgggcaatctccctctcacatcttgtcgacatccagcttagtttttgtagaaatttgcaggagatgccagtgctgagtaaactgcctcatttgaaatcactggaacttacagagttggataacttagagtacatggagagtagaagcagcagcagtagcagtgacacagaagcagcaacaccagaattaccaacattcttcccttcccttgaaaaactttcactttggggtctggaaaagttgaagggtttggggaacaggagatcgagtagttttccccgcctctctaaattggaaatctgggaatgcccagatctaacgtcatttccttcttgtccaagccttgaaaagttggaattgaaagaaaacaatgaagcgttgcaaataatagtaaaaataacaacaacaagaggtaaagaagaaaaagaagaagacaagaatgctggtgttggaaattcacaagatgatgacaatgtcaaattatggaaggtggaaatagacaatctgggttatctcaaatcactgcccacaaattgtcttactcacctcgaccttacaataagagattccaaggagggggagggtgaatgggaagttggggaggcatttcagaagtgtgtatcttctttgagaaagctcagcataatcggaaatcacggaataaataaagtgaagagactgtctggaagaacagggttggagcatttcactctgttggactcactcgaactttcaaatatagaagaccaggaagatgagggcgaa

SEQ ID NO: 115 - protein, 505 aa, Spinacia oleracea
HVGCVVDRDPEIVFLCSNKIRSYISGRCIKNPVDSQIDNWMRLRVLDLSDSCVKDLSDSIGKLLHLRYLNLSSNIKLEIIPDAITRLHNLQTLLLEYCRSLKELPKDFCKLVKLRHLDLRGCQCLIGMPLGMDRLISLRVLPKVVVGKKEQSDDQLKALKGLTEIKGSIDITIYSKYRIVEGMNDTGGAGYLKSMKHLTGVDIRFDDREGGCVNPEAVLATLEPPSNIKRLEMWHYSGTTIPVWGRAEINWAISLSHLVDIQLSFCRNLQEMPVLSKLPHLKSLELTELDNLEYMESRSSSSSSDTEAATPELPTFFPSLEKLSLWGLEKLKGLGNRRSSSFPRLSKLEIWECPDLTSFPSCPSLEKLELKENNEALQIIVKITTTRGKEEKEEDKNAGVGNSQDDDNVKLWKVEIDNLGYLKSLPTNCLTHLDLTIRDSKEGEGEWEVGEAFQKCVSSLRKLSIIGNHGINKVKRLSGRTGLEHFTLLDSLELSNIEDQEDEGE

SEQ ID NO: 116 - DNA, 1403 bp, Spinacia oleracea
acaagtggatgtgtcttaggatgttggacttgtcaaggtcggatgttaaaaatttgcctaattcaataggtaaattgttgcacttgaggtatcttaacctgtcagataatagaaatctaaagatacttcctgatgcaattacaagactgcataatttgcagacacttcttttagtagattgcagaagtttaaaggagttgccaaaagatttttgcaaattggtcaaactgaggcacttggaattacagggttgtcatgatttgattggtatgccatttggaatggataagctaactagtcttagagtactaccaaaagttgtggtgggtaagaaggaacaaagtgatgatcagctgaaagccctaaaaggcctcaccgagataaaaggctccattgatatcacaatctattcaaagtatagaatagttgaaggcatgaatgacacaggaggagctgggtatttgaagagcatgaaacatctcacgggggttgatattagatttgatgatagagaaggtggatttgttaaccctgaagctgtgttggcaaccctagagccaccttcaaatatcaagagcttatctatacatcgttttgatggtaaaacacttccagtatggggaagagcagagattaattgggcaatctccctctcacatcttgtcgacatccagctttggcattgtcgtaatttgcaggagatgccagtgctgagtaaactgcctcatttgaaatcactggacctttataatttgattagtttagagtacatggagagcacaagcagaagcagtagcagtgacacagaagcagcaacaccagaattaccaacattcttcccttcccttgaaaaacttacactttggcgtctggacaagttgaagggttttgggaacaggagatcgagtagttttccccgcctctctgaattggaaatctgggaatgcccagatctaacgtcatttccttcttgtccaagccttgaagagttggaattggaagaaaacaatgaagcgttgcaaataatagtaaaaataacaacaacaagaggtaaagaagaaaaagaagaagacaagaatgctggtgttggaaattcacaagatgatgacaatgtcaaattatggacggtggaaatagacaatctgggttatctcaaatcactgcccacaaattgtcttactcacctcgaccttacaataagagattccaaggagggggagggtgaatgggaagttggggatgcatttcagaagtgtgtatcttctttgagaagcctcaccataatcggaaatcacggaataaataaagtgaagagactgtctggaagaacagggttggagcatttcactctgttggactcactcaaattttcaaagatagaagaccaggaagatgagggcgaa

SEQ ID NO: 117 - protein, 467 aa, Spinacia oleracea
KWMCLRMLDLSRSDVKNLPNSIGKLLHLRYLNLSDNRNLKILPDAITRLHNLQTLLLVDCRSLKELPKDFCKLVKLRHLELQGCHDLIGMPFGMDKLTSLRVLPKVVVGKKEQSDDQLKALKGLTEIKGSIDITIYSKYRIVEGMNDTGGAGYLKSMKHLTGVDIRFDDREGGFVNPEAVLATLEPPSNIKSLSIHRFDGKTLPVWGRAEINWAISLSHLVDIQLWHCRNLQEMPVLSKLPHLKSLDLYNLISLEYMESTSRSSSSDTEAATPELPTFFPSLEKLTLWRLDKLKGFGNRRSSSFPRLSELEIWECPDLTSFPSCPSLEELELEENNEALQIIVKITTTRGKEEKEEDKNAGVGNSQDDDNVKLWTVEIDNLGYLKSLPTNCLTHLDLTIRDSKEGEGEWEVGDAFQKCVSSLRSLTIIGNHGINKVKRLSGRTGLEHFTLLDSLKFSKIEDQEDEGE

SEQ ID NO: 118 - DNA, 1403 bp, Spinacia oleracea
acaagtggatgtgtcttaggatgttggacttgtcaaggtcggatgttaaaaatttgcctaattcaataggtaaattgttgcacttgaggtatcttaacctgtcagataatagaaatctaaagatacttcctgatgcaattacaagactgcataatttgcagacacttcttttagtagattgcagaagtttaaaggagttgccaaaagatttttgcaaattggtcaaactgaggcacttggaattacagggttgtcatgatttgattggtatgccatttggaatggataagctaactagtcttagagtactaccaaaagttgtggtgggtaagaaggaacaaagtgatgatcagctgaaagccctaaaaggcctcaccgagataaaaggctccattgatatcacaatctattcaaagtatagaatagttgaaggcatgaatgacacaggaggagctgggtatttgaagagcatgaaacatctcacgggggttgatattagatttgatgatagagaaggtggatttgttaaccctgaagctgtgttggcaaccctagagccaccttcaaatatcaagagcttatctatacatcgttttgatggtaaaacacttccagtatggggaagagcagagattaattgggcaatctccctctcacatcttgtcgacatccagctttggcattgtcgtaatttgcaggagatgccagtgctgagtaaactgcctcatttgaaatcactggaactttataatttgattagtttagagtacatggagagcacaagcagaagcagtagcagtgacacagaagcagcaacaccagaattaccaacattcttcccttcccttgaaaaacttacactttggggtctggaaaagttgaagggtttggggaacaggagatcgagtagttttccccgcctctctaaattggaaatctgggaatgccctgatctaacgtcatttccttcttgtccaagccttgaagagttggaattggaagaaaacaatgaagcgttgcaaataatagtaaaaataacaacaacaagaggtaaagaagaaaaagaagaagacaagaatgctggtgttggaaattcacaagatgatgacaatgtcaaattatggacggtggaaatagacaatctgggttatctcaaatcactgcccacaaattgtcttactcacctcgaccttacaataagagattccaaggagggggagggtgaatgggaagttggggatgcatttcagaagtgtgtatcttctttgagaagcctcaccataatcggaaatcacggaataaataaagtgaagagactgtctggaagaacagggttggagcatttcactctgttggactcactcaaattttcaaagatagaagaccaggaagatgagggcgaa

SEQ ID NO: 119 - protein, 467 aa, Spinacia oleracea
KWMCLRMLDLSRSDVKNLPNSIGKLLHLRYLNLSDNRNLKILPDAITRLHNLQTLLLVDCRSLKELPKDFCKLVKLRHLELQGCHDLIGMPFGMDKLTSLRVLPKVVVGKKEQSDDQLKALKGLTEIKGSIDITIYSKYRIVEGMNDTGGAGYLKSMKHLTGVDIRFDDREGGFVNPEAVLATLEPPSNIKSLSIHRFDGKTLPVWGRAEINWAISLSHLVDIQLWHCRNLQEMPVLSKLPHLKSLELYNLISLEYMESTSRSSSSDTEAATPELPTFFPSLEKLTLWGLEKLKGLGNRRSSSFPRLSKLEIWECPDLTSFPSCPSLEELELEENNEALQIIVKITTTRGKEEKEEDKNAGVGNSQDDDNVKLWTVEIDNLGYLKSLPTNCLTHLDLTIRDSKEGEGEWEVGDAFQKCVSSLRSLTIIGNHGINKVKRLSGRTGLEHFTLLDSLKFSKIEDQEDEGE

SEQ ID NO: 120 - DNA, 1466 bp, Spinacia oleracea
acaagtggatgtgtcttaggatgttggacttgtcatggtcggatgttaaaaatttgcctaattcaataggtaaattgttgcacttgaggtgtcttaacctgtcttataataaagatctgttgatactccctgatgcaattacaagactgcataatttgcagacactgcttttaaaagagtgcagaagtttaaaggagttgccaaaagatttttgcaaattggtcaaactgaggcacttggatttaaggtgttctgatttgaaggagttgccaaaagatttttgcaaattggtcaaactgaggcacttggatttatggggttgtgatgatttgattggtgtgccattgggaatggataggctaattagtcttagagtactgccattctttgtggtgggtaggaaggaacaaagtgatgatgatgagctgaaagccctaaaaggcctcaccgagataaaaggctccattcgtattagaatctattcaaagtatagaatagttgaaggcatgaatgacacaggaggagctgggtatttaaagagcatgaaacatctcacgggggttgatattacatttgatggtggatgtgttaaccctgaagctgtgttggcaaccctagagccaccttcaaatatcaagaggttagagatgtggcattacagtggtacaacaattccagtatggggaagagcagagattaattgggcaatctccctctcacatcttgtcgacatccagctttggcattgtcgtaatttgcaggagatgccagtgctgagtaaactgcctcatttgaaatcactggaactttataatttgattagtttagagtacatggagagcacaagcagaagcagtagcagtgacacagaagcagcaacaccagaattaccaacattcttcccttcccttgaaaaacttacactttggcgtctggacaagttgaagggttttgggaacaggagatcgagtagttttccccgcctctctaaattggaaatctggaaatgcccagatctaacgtcatttccttcttgtccaagccttgaagagttggaattgaaagaaaacaatgaagcattgcaaataatagtaaaaataacaacaacaagaggtaaagaagaaaaagaagaagacaagaatgctggtgttggaaattcacaagatgatgacaatgtcaaattacggaaggtggaaatagacaatgtgagttatctcaaatcactgcccacaaattgtcttactcacctcgaccttacaataagagattccaaggagggggagggtgaatgggaagttggggatgcatttcagaagtgtgtatcttctttgagaagcctcaccataatcggaaatcacggaataaataaagtgaagagactgtctggaagaacagggttggagcatttcactctgttggaatcactcaaactttcagatatagaagaccaggaagatgagggcgaa

SEQ ID NO: 121 - protein, 488 aa, Spinacia oleracea
KWMCLRMLDLSWSDVKNLPNSIGKLLHLRCLNLSYNKDLLILPDAITRLHNLQTLLLKECRSLKELPKDFCKLVKLRHLDLRCSDLKELPKDFCKLVKLRHLDLWGCDDLIGVPLGMDRLISLRVLPFFVVGRKEQSDDDELKALKGLTEIKGSIRIRIYSKYRIVEGMNDTGGAGYLKSMKHLTGVDITFDGGCVNPEAVLATLEPPSNIKRLEMWHYSGTTIPVWGRAEINWAISLSHLVDIQLWHCRNLQEMPVLSKLPHLKSLELYNLISLEYMESTSRSSSSDTEAATPELPTFFPSLEKLTLWRLDKLKGFGNRRSSSFPRLSKLEIWKCPDLTSFPSCPSLEELELKENNEALQIIVKITTTRGKEEKEEDKNAGVGNSQDDDNVKLRKVEIDNVSYLKSLPTNCLTHLDLTIRDSKEGEGEWEVGDAFQKCVSSLRSLTIIGNHGINKVKRLSGRTGLEHFTLLESLKLSDIEDQEDEGE

SEQ ID NO: 122 - DNA, 1466 bp, Spinacia oleracea
acaagtggatgtgtcttaggatgttggacttgtcatggtcggatgttaaaaatttgcctaattcaataggtaaattgttgcacttgaggtgtcttaacctgtcttataataaagatctgttgatactccctgatgcaattacaagactgcataatttgcagacactgcttttaaaagagtgcagaagtttaaaggagttgccaaaagatttttgcaaattggtcaaactgaggcacttggatttaaggtgttctgatttgaaggagttgccaaaagatttttgcaaattggtcaaactgaggcacttggatttatggggttgtgatgatttgattggtgtgccattgggaatggataggctaattagtcttagagtactgccattctttgtggtgggtaggaaggaacaaagtgatgatgatgagctgaaagccctaaaaggcctcaccgagataaaaggctccattcgtattagaatctattcaaagtatagaatagttgaaggcatgaatgacacaggaggagctgggtatttaaagagcatgaaacatctcacgggggttgatattacatttgatggtggatgtgttaaccctgaagctgtgttggcaaccctagagccaccttcaaatatcaagaggttagagatgtggcattacagtggtacaacaattccagtatggggaagagcagagattaattgggcaatctccctctcacatcttgtcgacatccagctttggcattgtcgtaatttgcaggagatgccagtgctgagtaaactgcctcatttgaaatcactggaactttataatttgattagtttagagtacatggagagcacaagcagaagcagtagcagtgacacagaagcagcaacaccagaattaccaacattcttcccttcccttgaaaaacttagactttggcgtctggacaagttgaagggttttgggaacaggagatcgagtagttttccccgcctctctaaattggaaatctggaaatgcccagatctaacgtcatttccttcttgtccaagccttgaagagttggaattgaaagaaaacaatgaagcattgcaaataatagtaaaaataacaacaacaagaggtaaagaagaaaaagaagaagacaagaatgctggtgttggaaattcacaagatgatgacaatgtcaaattacggaaggtggaaatagacaatgtgagttatctcaaatcactgcccacaaattgtcttactcacctcgaccttacaataagagattccaaggagggggagggtgaatgggaagttggggatgcatttcagaagtgtgtatcttctttgagaagcctcaccataatcggaaatcacggaataaataaagtgaagagactgtctggaagaacagggttggagcatttcactctgttggaatcactcaaactttcagatatagaagaccaggaagatgagggcgaa

SEQ ID NO: 123 - protein, 488 aa, Spinacia oleracea
KWMCLRMLDLSWSDVKNLPNSIGKLLHLRCLNLSYNKDLLILPDAITRLHNLQTLLLKECRSLKELPKDFCKLVKLRHLDLRCSDLKELPKDFCKLVKLRHLDLWGCDDLIGVPLGMDRLISLRVLPFFVVGRKEQSDDDELKALKGLTEIKGSIRIRIYSKYRIVEGMNDTGGAGYLKSMKHLTGVDITFDGGCVNPEAVLATLEPPSNIKRLEMWHYSGTTIPVWGRAEINWAISLSHLVDIQLWHCRNLQEMPVLSKLPHLKSLELYNLISLEYMESTSRSSSSDTEAATPELPTFFPSLEKLRLWRLDKLKGFGNRRSSSFPRLSKLEIWKCPDLTSFPSCPSLEELELKENNEALQIIVKITTTRGKEEKEEDKNAGVGNSQDDDNVKLRKVEIDNVSYLKSLPTNCLTHLDLTIRDSKEGEGEWEVGDAFQKCVSSLRSLTIIGNHGINKVKRLSGRTGLEHFTLLESLKLSDIEDQEDEGE

SEQ ID NO: 124 - DNA, 1397 bp, Spinacia oleracea
acaagtggatgtgtcttaggatgttggacttgtcaaggtcggatgttaaaaatttgcctaattcaataggtaaactattgcacttaaggtatcttaacctgtccggtaatagaaagttggagatactccctgatgcgattacaaaactgcataatttgcagacacttcttttagaaggttgcggaagtttaaaggagttgccaaaagatttttgcaaattggtcaaactgagacacttggatttatggggttgtgatgatttgattggtatgccattgggaatggatatgctaactagtcttagagtactgccatactttgtggtgggtaggaagaaacaaagtgttgatgatgagctgaaagccctaaaaggcctcaccgagataaaaggcgacattgatatcaaaatctgttccaattatagaatagttgaaggcatgaatgacacaggaggagctgggtatttgaagagcatgaaacatctcacgggggttgatattacatttgatggtggatgtgttaaccctgaagctgtgttggcaaccctagagccaccttcaaatatcaagagcttatctatagataattacgatggtacaacaattccagtatggggaagagcagagattaattgggcaatctccctctcacatcttgtcgacatttggttttgggattgtagtgatttgcaggagatgccagtgctgagtaaactgcctcatttgaaatcactggaactttttaagttttgtaagttagagtacatggagagtagaagcagcagcagtagcagtgacacagaagcagcaacaccagaattaccaacattcttcccttcccttgaaaaacttacactttggtatctggaaaagttgaagggtttggggaacaggagatcgagtagttttccccgcctctctgaattggaaatctgggaatgcccagatctaacgtggtttcctccttgtccaagccttaaaacgttgaaattggaaaaaaacaatgaagcgttgcaaataatagtaaaaataacaacaacaagaggtaaagaagaaaaagaagaagacaagaatgctggtgttggaaattcacaagatgatgacaatgtcaaattacggaaggtggaaatagacaatctgggttatctcaaatcactgcccacaaattgtctgactcacctcgacattacaataagagattccaaggagggggagggtgaatgggaagttggggaggcatttcagaagtgtgtatcttctttgagaaagctcagcataatcggaaatcacggaataaataaagtgaagagactgtctggaagaacagggttggagcatttcactctgttggactcactcaaattttcagatatagacgaccaggaagatgagggcgaa

SEQ ID NO: 125 - protein, 465 aa, Spinacia oleracea
KWMCLRMLDLSRSDVKNLPNSIGKLLHLRYLNLSGNRKLEILPDAITKLHNLQTLLLEGCGSLKELPKDFCKLVKLRHLDLWGCDDLIGMPLGMDMLTSLRVLPYFVVGRKKQSVDDELKALKGLTEIKGDIDIKICSNYRIVEGMNDTGGAGYLKSMKHLTGVDITFDGGCVNPEAVLATLEPPSNIKSLSIDNYDGTTIPVWGRAEINWAISLSHLVDIWFWDCSDLQEMPVLSKLPHLKSLELFKFCKLEYMESRSSSSSSDTEAATPELPTFFPSLEKLTLWYLEKLKGLGNRRSSSFPRLSELEIWECPDLTWFPPCPSLKTLKLEKNNEALQIIVKITTTRGKEEKEEDKNAGVGNSQDDDNVKLRKVEIDNLGYLKSLPTNCLTHLDITIRDSKEGEGEWEVGEAFQKCVSSLRKLSIIGNHGINKVKRLSGRTGLEHFTLLDSLKFSDIDDQEDEGE

SEQ ID NO: 126 - DNA, 1526 bp, Spinacia oleracea
acaagtggatgtgtcttaggatgttggacttgtcatggtcggatgttaaaaatttgcctaattcaataggtaaattgttgcacttgaggtatcttaacctgtcagataatagaaatctaaagatacttcctgatgcaattacaagactgcataatttgcagacactgcttttaaaagattgcagaagtttaaaggagttgccaaaagatttttgcaaattggtcaaactgagacacttggatttatggggttgtgatgatttgattggtatgccatttggaatggataagctaactagtcttagaatactaccaaacattgtggtgggtaggaaggaacaaagtgttgatgatgagctgaaagcccttaaaggcctcaccgagataaaaggcgacattgatatcaaaatctgtgaaaattatagaatagttgaaggcatgaatgacacaggaggagctgggtatttgaagagcatgaaacatctcagggagattggtattacatttgatggtggatgtgttaaccctgaagctgtgttggcaaccctagagccaccttcaaatatcaagagcttatctatacatcgttttgatggtaaaacacttccagtatggggaagagcagagattaattgggcaatctccctctcacatcttgtcgacatccagctttggcattgtcgtaatttgcaggagatgccagtgctgagtaaactgcctcatttgaaatcactggaactttataatttgattagtttagagtacatggagagcacaagcagaagcagtagcagtgacacagaagcagcaacaccagaattaccaacattcttcccttcccttgaaaaacttacactttggggtctggaaaagttgaagggtttggggaacaggagatcgagtagttttccccgcctctctgaattgaaaatcatggaatgcccagatctaacgtggtttcctccctgtccaagccttgaaaaacttacactttggcgtctggacaagttgaagggttttgggaaccggagatcgagtacttttccccgcctctctgaattggaaatcaagaaatgcccagatctaacgtcatttccttcttgtccaagccttgagaagttggaattgaaagaaagcaatgaagcattgcaaataatagtaaaaataacaacaagaggtaaagaaaaagaagagaacaataatgctggtgttagaaattcacaagatgatgacaaagtcaaattacggaagatggtgatagacaatctgggttatctcaaatcactgcccacaaattgtcttactcacctcgaccttacaataagtgattccaaggagggggagggtgaatgggaagttggggatgcatttcagaagtgtgtatcttctttgagaagcctcaccataatcggaaatcacggaataaataaagtgaagagactgtctggaagaacagggttggagcatttcactctgttggaatcactcaaactttcagatatagaagaccaggaagatgagggcgaa

SEQ ID NO: 127 - protein, 508 aa, Spinacia oleracea
KWMCLRMLDLSWSDVKNLPNSIGKLLHLRYLNLSDNRNLKILPDAITRLHNLQTLLLKDCRSLKELPKDFCKLVKLRHLDLWGCDDLIGMPFGMDKLTSLRILPNIVVGRKEQSVDDELKALKGLTEIKGDIDIKICENYRIVEGMNDTGGAGYLKSMKHLREIGITFDGGCVNPEAVLATLEPPSNIKSLSIHRFDGKTLPVWGRAEINWAISLSHLVDIQLWHCRNLQEMPVLSKLPHLKSLELYNLISLEYMESTSRSSSSDTEAATPELPTFFPSLEKLTLWGLEKLKGLGNRRSSSFPRLSELKIMECPDLTWFPPCPSLEKLTLWRLDKLKGFGNRRSSTFPRLSELEIKKCPDLTSFPSCPSLEKLELKESNEALQIIVKITTRGKEKEENNNAGVRNSQDDDKVKLRKMVIDNLGYLKSLPTNCLTHLDLTISDSKEGEGEWEVGDAFQKCVSSLRSLTIIGNHGINKVKRLSGRTGLEHFTLLESLKLSDIEDQEDEGE

SEQ ID NO: 128 - DNA, 1406 bp, Spinacia oleracea
acaagtggatgtgtcttagggtgttggacttgtcaaggtcggatgttaaaaatttgcctaattcaataggtaaattgttgcacttgaggtgtcttaacctgtcttataataaagatctgttgatactccctgatgcaattacaagactgcataatttgcagacactgcttttaaaagattgcagaagtttaaaggagttgccaaaagatttttgcaaattggtcaaactgagacacttggatttaaggggttgtgatgatttgattggtatgccattgggaatggatatgctaactagtcttagagtactgccattctttgtggtgggtaggaaggaacaaagtgatgatgatgagctgaaagccctaaaaggcctcaccgagataaaaggcgacattgatatcaaaatctgttccaattatagaatagttgaaggcatgaatgacacaggaggagctgggtatttgaagagcatgaaacatctcacgggggttattattacatttgatgataatgaagatggatgtgttaaacctgaagctgtattggaaacccttgagccaccttcaaatatcaagaggttacttataggaaggtaccgtggtacaacaattccagtatggggaagagcagagattaattgggcaatctccctctcacatcttgtcgatatcacgcttatttattgttataatttgcaggagattccagtgctgagtaaactgcctcatttgaaattactggaactttataagttgattagcttagagtacatggagaatacaagcagaagcagtagcagtgacacagaagcagcaacactagaattaccaacattcttcccttcccttaaaaaacttacacttatcggtctgacaaagttgaagggtctggggaacaggagatcgagtagttttccccgcctctctaaattggtaatctgggaatgcccagatctaacgtggtttcctccttgtccaagccttgaaacgttgaaattggaaaaaaacaatgaagcgttgcaaataatagtaaaaataacaacaacaagaggtaaagaagaaaaagaagaagacaagaatgctggtgttggaaattcacaagatgatgacaatgtcaaattatggaaggtggaaatagacaatctgggttatctcaaatcactgcccacaaattgtctgactcacctcgacattacaataagagattccgaaggggaggagggtgaatgggaagttggggatacatttcagaagtgtgtatcttctttgagaagcctcgtcataatcggaaatcagggaataaataaagtgaatagactgtctggaagaacagggttggagcatttcactctgttggactcactcaaattttcagatatagacgaccaggaagatgagggcgaa

SEQ ID NO: 129 - protein, 468 aa, Spinacia oleracea
KWMCLRVLDLSRSDVKNLPNSIGKLLHLRCLNLSYNKDLLILPDAITRLHNLQTLLLKDCRSLKELPKDFCKLVKLRHLDLRGCDDLIGMPLGMDMLTSLRVLPFFVVGRKEQSDDDELKALKGLTEIKGDIDIKICSNYRIVEGMNDTGGAGYLKSMKHLTGVIITFDDNEDGCVKPEAVLETLEPPSNIKRLLIGRYRGTTIPVWGRAEINWAISLSHLVDITLIYCYNLQEIPVLSKLPHLKLLELYKLISLEYMENTSRSSSSDTEAATLELPTFFPSLKKLTLIGLTKLKGLGNRRSSSFPRLSKLVIWECPDLTWFPPCPSLETLKLEKNNEALQIIVKITTTRGKEEKEEDKNAGVGNSQDDDNVKLWKVEIDNLGYLKSLPTNCLTHLDITIRDSEGEEGEWEVGDTFQKCVSSLRSLVIIGNQGINKVNRLSGRTGLEHFTLLDSLKFSDIDDQEDEGE

SEQ ID NO: 130 - DNA, 2078 bp, Spinacia oleracea
acaagtggatgtgtcttaggatgttggacttgtcatggtcggatgttaaaaatttgcctaattcaataggtaaattgttgcacttgaggtatcttaacctgtcagataatagaaatctaaagatacttcctgatgcaattacaagactgcataatttgcagacactgcttttagaagattgcagaagtttaaaggagttgccaaaagatttttgcaaattggtcaaactgaggcacttggaattacagggttgtcatgatttgattggtatgccatttggaatggataagctaactagtcttagaatactaccaaacattgtggtgggtaggaaggaacaaagtgatgatgagctgaaagccctaaaaggcctcaccgagataaaaggctccatttctatcagaatctattcaaagtatagaatagttgaaggcatgaatgacacaggaggagctgcttatttgaagagcatgaaacatctcagggagattgatattacatttttgggtgaatgtgttggccctgaagctgtattggaaaccttagagccaccttcaaatatcaagagcttatatatatataattacagtggtacaacaattccagtatggggaagagcagagattaattgggcaatctccctctcacatctcgtcgacatccagcttagttgttgtagtaatttgcaggagatgccagtgctgagtaaactgcctcatttgaaatcgctgaaacttggatggttggataacttagagtacatggagagtagcagtagcagtgacacagaagcagcaacaccagaattaccaacattcttcccttcccttgaaaaacttactttacagcatctggaaaagttgaagggttttgggaacaggagatcgagtagttttccccgcctctctgaattggaaatcaagaaatgcccagatctaacgtcatttccttcttgtccaagccttgagaagttggaattgaaagaaagcaatgaagcattgcaaataatagtaaaaataacaacaagaggtaaagaaaaagaagagaacaataatgctggtgttagaaattcacaagatgatgacaaagtcaaattacggaagatggtgatagacaatctgggttatctcacgggggttgatattagatttgatgatagagaaggtggatttgttaaccctgaagctgtgttggcaaccctagagccaccttcaaatatcaagagcttatctatacatcgttttgatggtaaaacacttccagtatggggaagagcagagattaattgggcaatctccctctcacatcttgtcgacatccagctttggcattgtcgtaatttgcaggagatgccagtgctgagtaaactgcctcatttgaaatcactggaactttataatttgattagtttagagtacatggagagcacaagcagaagcagtagcagtgacacagaagcagcaacaccagaattaccaacattcttcccttcccttgaaaaacttagactttggtatctggaaaagttgaagggtttggggaacaggagaccgagtagttttccccgcctctctgaattggaaatctgggaatgcccagatctaacgtggtttcctccttgtccaagccttaaaacgttgaaattggaaaaaaacaatgaagcgttgcaaataatagtaaaaataacaacaacaagaggtaaagaagaaaaagaagaagacaagaatgctggtgttggaaattcacaagatgatgacaatgtcaaattacggaaggtggaaatagacaatgtgagttatctcaaatcactgcccacaaattgtcttactcacctcaaaataactggaatagattacagggagggggagattgaatcagattccgtggaggaggagattgaattggaagttggggaggcatttcagaagtgtgcatcttctttgagaagcctcatcataatcggaaatcacggaataaataaagtgatgagactgtctggaagaacagggttggagcatttcactctgttggactcactcaaattttcaaagatagaagaccaggaagatgagggcgaa

SEQ ID NO: 131 - protein, 692 aa, Spinacia oleracea
KWMCLRMLDLSWSDVKNLPNSIGKLLHLRYLNLSDNRNLKILPDAITRLHNLQTLLLEDCRSLKELPKDFCKLVKLRHLELQGCHDLIGMPFGMDKLTSLRILPNIVVGRKEQSDDELKALKGLTEIKGSISIRIYSKYRIVEGMNDTGGAAYLKSMKHLREIDITFLGECVGPEAVLETLEPPSNIKSLYIYNYSGTTIPVWGRAEINWAISLSHLVDIQLSCCSNLQEMPVLSKLPHLKSLKLGWLDNLEYMESSSSSDTEAATPELPTFFPSLEKLTLQHLEKLKGFGNRRSSSFPRLSELEIKKCPDLTSFPSCPSLEKLELKESNEALQIIVKITTRGKEKEENNNAGVRNSQDDDKVKLRKMVIDNLGYLTGVDIRFDDREGGFVNPEAVLATLEPPSNIKSLSIHRFDGKTLPVWGRAEINWAISLSHLVDIQLWHCRNLQEMPVLSKLPHLKSLELYNLISLEYMESTSRSSSSDTEAATPELPTFFPSLEKLRLWYLEKLKGLGNRRPSSFPRLSELEIWECPDLTWFPPCPSLKTLKLEKNNEALQIIVKITTTRGKEEKEEDKNAGVGNSQDDDNVKLRKVEIDNVSYLKSLPTNCLTHLKITGIDYREGEIESDSVEEEIELEVGEAFQKCASSLRSLIIIGNHGINKVMRLSGRTGLEHFTLLDSLKFSKIEDQEDEGE

SEQ ID NO: 132 - DNA, 1832 bp, Spinacia oleracea
acaagtggatgtgtcttaggatgttggacttgtcatggtcggatgttaaaaatttgcctaattcaataggtaaattgttgcacttgaggtgtcttaacctgtcttataataaagatctgttgatactccctgatgcaattacaagactgcataatttgcagacactgcttttaaaagagtgcagaagtttaaaggagttgccaaaagatttttgcaaattggtcaaactgaggcacttggatttaaggtgttctgatttgaaggagttgccaaaagatttttgcaaattggtcaaactgaggcacttggatttaaggtgttctgatttgaaggagttgccaaaagatttttgcaaattggtcaaactgaggcacttggatttatggggttgtgatgatttgattggtgtgccattgggaatggataggctaattagtcttagagtactgccattctttgtggtgggtaggaaggaacaaagtgatgatgatgagctgaaagccctaaaaggcctcaccgagataaaaggctccattcgtattagaatctattcaaagtatagaatagttgaaggcatgaatgacacaggaggagctgggtatttaaagagcatgaaacatctcacgggggttgatattacatttgatggtggatgtgttaaccctgaagctgtgttggcaaccctagagccaccttcaaatatcaagaggttagagatgtggcattacagtggtacaacaattccagtatggggaagagcagagattaattgggcaatctccctctcacatcttgtcgacatccagctttggtgttgtagtaatttgcaggagatgccagtgctgagtaaactgcctcatttgaaatcactgtatctttttaagttttgtaagttagagtacatggagagtagaagcagcagcagtagcagtgacacagaagcagcaacaccagaattaccaacattcttcccttcccttgaaaaacttagactttggtatctggaaaagttgaagggtttggggaacaggagaccgagtagttttccccgcctctctgaattggaaatctgggaatgcccagatctaacgtggtttcctccctgtccaagccttgaaaaacttacactttggcgtctggacaagttgaagggtttggggaacaggagatcgagtagttttccccgcctctctaaattggtaatctggaaatgcccagatctaacgtggtttcctccctgtccaagccttgaaaaacttacactttggcgtctggacaagttgaagggtttggggaacaggagatcgagtagttttccccgcctctctgaattggaaatcaagaaatgcccagatctaacgtggtttcctccttgtccaagccttgaaacgttgaaattggaaaaaaacaatgaagcgttgcaaataatagtaaaaataacaacaacaagaggtaaagaagaaaaagaagaagacaagaatgctggtgttggaaattcacaagatgatgacaatgtcaaattatggacggtggaaatagacaatctgggttatctcaaatcactgcccacaaattgtcttactcacctcaaaataactggaatagattacagggagggggagattgaatcagattccgtggaggaggagattgaattggaagttggggaggcatttcagaagtgtgcatcttctttgagaagcctcatcataatcggaaatcacggaataaataaagtgatgagactgtctggaagaacagggttggagcatttcactctgttggactcactcaaactttcaaatatagaagaccaggaagatgagggcgaa

SEQ ID NO: 133 - protein, 610 aa, Spinacia oleracea
KWMCLRMLDLSWSDVKNLPNSIGKLLHLRCLNLSYNKDLLILPDAITRLHNLQTLLLKECRSLKELPKDFCKLVKLRHLDLRCSDLKELPKDFCKLVKLRHLDLRCSDLKELPKDFCKLVKLRHLDLWGCDDLIGVPLGMDRLISLRVLPFFVVGRKEQSDDDELKALKGLTEIKGSIRIRIYSKYRIVEGMNDTGGAGYLKSMKHLTGVDITFDGGCVNPEAVLATLEPPSNIKRLEMWHYSGTTIPVWGRAEINWAISLSHLVDIQLWCCSNLQEMPVLSKLPHLKSLYLFKFCKLEYMESRSSSSSSDTEAATPELPTFFPSLEKLRLWYLEKLKGLGNRRPSSFPRLSELEIWECPDLTWFPPCPSLEKLTLWRLDKLKGLGNRRSSSFPRLSKLVIWKCPDLTWFPPCPSLEKLTLWRLDKLKGLGNRRSSSFPRLSELEIKKCPDLTWFPPCPSLETLKLEKNNEALQIIVKITTTRGKEEKEEDKNAGVGNSQDDDNVKLWTVEIDNLGYLKSLPTNCLTHLKITGIDYREGEIESDSVEEEIELEVGEAFQKCASSLRSLIIIGNHGINKVMRLSGRTGLEHFTLLDSLKLSNIEDQEDEGE

SEQ ID NO: 134 - DNA, 1424 bp, Spinacia oleracea
acaagtggatgtgtcttaggatgttggacttgtcatggtcggatgttaaaaatttgcctaattcaataggtaaattgttgcacttgaggtatcttaacctgtcagataatagaaatctaaagatacttcctgatgcaattacaagactgcataatttgcagacactgcttttagaagattgcagaagtttaaaggagttgccaaaagatttttgcaaattggtcaaactgagacacttggatttatggggttgtgatgatttgattggtatgccatttggaatggataagctaactagtcttagaatactaccaaacattgtggtgggtaggaaggaacaaagtgttgatgatgagctgaaagcccttaaaggcctcaccgagataaaaggcgacattgatatcaaaatctgtgaaaattatagaatagttgaaggcatgaatgacacaggaggagctgggtatttgaagagcatgaaacatctcagggagattggtattacatttgatggtggatgtgttaaccctgaagctgtgttggcaaccctagagccaccttcaaatatcaagagcttatctatagataattacgatggtacaacaattccagtatggggaagagcagagattaattgggcaatctccctctcacatcttgtcgacatcacgcttgaagattgttacaatttgcaggagatgccagtgctgagtaaactgcctcatttgaaatcactgtatctttttaagttttgtaagttagagtacatggagagtagaagcagcagcagtagcagtgacacagaagcagcaacaccagaattaccaacattcttcccttcccttgaaaaacttagactttggtatctggaaaagttgaagggtttggggaacaggagaccgagtagttttccccgcctctctgaattggaaatctgggaatgcccagatctaacgtggtttcctccttgtccaagccttaaaacgttgaaattggaaaaaaacaatgaagcgttgcaaataatagtaaaaataacaacaacaagaggtaaagaagaaaaagaagaagacaagaatgctggtgttggaaattcacaagatgatgacaatgtcaaattacggaaggtggaaatagacaatgtgagttatctcaaatcactgcccacaaattgtcttactcacctcaaaataactggaatagattacagggagggggagattgaatcagattccgtggaggaggagattgaattggaagttggggaggcatttcagaagtgtgcatcttctttgagaagcctcatcataatcggaaatcacggaataaataaagtgatgagactgtctggaagaacagggttggagcatttcactctgttggactcactcaaattttcaaagatagaagaccaggaagatgagggcgaa

SEQ ID NO: 135 - protein, 474 aa, Spinacia oleracea
KWMCLRMLDLSWSDVKNLPNSIGKLLHLRYLNLSDNRNLKILPDAITRLHNLQTLLLEDCRSLKELPKDFCKLVKLRHLDLWGCDDLIGMPFGMDKLTSLRILPNIVVGRKEQSVDDELKALKGLTEIKGDIDIKICENYRIVEGMNDTGGAGYLKSMKHLREIGITFDGGCVNPEAVLATLEPPSNIKSLSIDNYDGTTIPVWGRAEINWAISLSHLVDITLEDCYNLQEMPVLSKLPHLKSLYLFKFCKLEYMESRSSSSSSDTEAATPELPTFFPSLEKLRLWYLEKLKGLGNRRPSSFPRLSELEIWECPDLTWFPPCPSLKTLKLEKNNEALQIIVKITTTRGKEEKEEDKNAGVGNSQDDDNVKLRKVEIDNVSYLKSLPTNCLTHLKITGIDYREGEIESDSVEEEIELEVGEAFQKCASSLRSLIIIGNHGINKVMRLSGRTGLEHFTLLDSLKFSKIEDQEDEGE

SEQ ID NO: 136 - DNA, 1516 bp, Spinacia oleracea
tcacgtgggttgtgttgtcgatagagatccagaaatagtctttttatgtagcaataagattcgttcgtatattagcggtcgttgtataaagaatccggtggattcacaaatagacaactggatgcgccttagggtgttggacttgtcagattcatgtgttaaagatttgtctgattcaataggtaagctgctgcacttaaggtatcttaacctctcttctaatataaagttggagataatccctgatgcaattacaagactgcataacttgcagacactgcttttaaaagattgcagaagtttaaaggagttgccaaaagatttttgcaaattggtcaaactgagacacttggatttaaggggttgtcagtgtttgattggtatgccattgggaatggataggctaattagtcttagagtactaccaaaagttgtggtgggtaagaaggaacaaagtgatgatcagctgaaagccctaaaaggcctcaccgagataaaaggctccattgatatcacaatctattcaaagtatagaatagttgaaggcatgaatgacacaggaggagctgggtatttgaagagcatgaaacatctcacgggggttgatattagatttgatgatagagaaggtggatttgttaaccctgaagctgtgttggcaaccctagagccaccttcaaatatcaagagcttatctatacatcgttttgatggtaaaacacttccagtatggggaagagcagagattaattgggcaatctccctctcacatcttgtcgacatccagctttggcattgtcgtaatttgcaggagatgccagtgctgagtaaactgcctcatttgaaatcactggaacttacagagttggataacttagagtacatggagagtagaagcagcagcagtagcagtgacacagaagcagcaacaccagaattaccaacattcttcccttcccttgaaaaacttacactttggggtctggaaaagttgaagggtttggggaacaggagatcgagtagttttccccgcctctctaaattggaaatctgggaatgcccagatctaacgtcatttccttcttgtccaagccttgaaaagttggaattgaaagaaaacaatgaagcgttgcaaataatagtaaaaataacaacaacaagaggtaaagaagaaaaagaagaagacaagaatgctggtgttggaaattcacaagatgatgacaatgtcaaattatggaaggtggaaatagacaatctgggttatctcaaatcactgcccacaaattgtctgactcacctcgaccttacaataagtgattccaaggagggggagggtgaatgggaagttggggatgcatttcagaagtgtgtatcttctttgagaagcctcaccataatcggaaatcacggaataaataaagtgaagagactgtctggaagaacagggttggagcatttcactctgttggaatcactcaaactttcagatatagaagaccaggaagatgagggcgaa

SEQ ID NO: 137 - protein, 505 aa, Spinacia oleracea
HVGCVVDRDPEIVFLCSNKIRSYISGRCIKNPVDSQIDNWMRLRVLDLSDSCVKDLSDSIGKLLHLRYLNLSSNIKLEIIPDAITRLHNLQTLLLKDCRSLKELPKDFCKLVKLRHLDLRGCQCLIGMPLGMDRLISLRVLPKVVVGKKEQSDDQLKALKGLTEIKGSIDITIYSKYRIVEGMNDTGGAGYLKSMKHLTGVDIRFDDREGGFVNPEAVLATLEPPSNIKSLSIHRFDGKTLPVWGRAEINWAISLSHLVDIQLWHCRNLQEMPVLSKLPHLKSLELTELDNLEYMESRSSSSSSDTEAATPELPTFFPSLEKLTLWGLEKLKGLGNRRSSSFPRLSKLEIWECPDLTSFPSCPSLEKLELKENNEALQIIVKITTTRGKEEKEEDKNAGVGNSQDDDNVKLWKVEIDNLGYLKSLPTNCLTHLDLTISDSKEGEGEWEVGDAFQKCVSSLRSLTIIGNHGINKVKRLSGRTGLEHFTLLESLKLSDIEDQEDEGE

SEQ ID NO: 138 - DNA, 1424 bp, Spinacia oleracea
acaagtggatgtgtcttaggatgttggacttgtcaaggtcggatgttaaaaatttgcctaattcaataggtaaattgttgcacttgaggtatcttaacctgtcagataatagaaatctaaagatacttcctgatgcaattacaagactgcataatttgcagacactacttttagaacgttgcgaaagtttaaaggagttgccaaaagatttttgcaaattggtcaaactgagacacttggatttaaggggatgtttttctttgattggtatgccattgggaatggataggctaattagtcttagaatactaccaaacattgtggtgggtaggaaggaacaaagtgatgatgatgagctgaaagccctaaaaggcctcaccgagataaaaggctccattcgtattagaatctattcaaagtatagaatagttgaaggcatgaatgacacaggaggagctgggtatttaaagagcatgaaacatctcacgggggttgatattacatttgatggtggatgtgttaaccctgaagctgtgttggcaaccctagagccaccttcaaatatcaagaggttagagatgtggcattacagtggtacaacaattccagtatggggaagagcagagattaattgggcaatctccctctcacatcttgtcgacatccagctttggcattgtcgtaatttgcaggagatgccagtgctgagtaaactgcctcatttgaaatcactggaactttataatttgattagtttagagtacatggagagcacaagcagaagcagtagcagtgacacagaagcagcaacaccagaattaccaacattcttcccttcccttgaaaaacttacactttggcgtctggacaagttgaagggttttgggaacaggagatcgagtagttttccccgcctctctaaattggaaatctgggaatgcccagatctaacgtggtttcctccttgtccaagccttaaaacgttgaaattggaaaaaaacaatgaagcgttgcaaataatagtaaaaataacaacaacaagaggtaaagaagaaaaagaagaagacaagaatgctggtgttggaaattcacaagatgatgacaatgtcaaattacggaaggtggaaatagacaatgtgagttatctcaaatcactgcccacaaattgtcttactcacctcaaaataactggaatagattacagggagggggagattgaatcagattccgtggaggaggagattgaattggaagttggggaggcatttcagaagtgtgcatcttctttgagaagcctcatcataatcggaaatcacggaataaataaagtgatgagactgtctggaagaacagggttggagcatttcactctgttggactcactcgaactttcaaagatagaagaccaggaagatgagggcgaa

SEQ ID NO: 139 - protein, 474 aa, Spinacia oleracea
KWMCLRMLDLSRSDVKNLPNSIGKLLHLRYLNLSDNRNLKILPDAITRLHNLQTLLLERCESLKELPKDFCKLVKLRHLDLRGCFSLIGMPLGMDRLISLRILPNIVVGRKEQSDDDELKALKGLTEIKGSIRIRIYSKYRIVEGMNDTGGAGYLKSMKHLTGVDITFDGGCVNPEAVLATLEPPSNIKRLEMWHYSGTTIPVWGRAEINWAISLSHLVDIQLWHCRNLQEMPVLSKLPHLKSLELYNLISLEYMESTSRSSSSDTEAATPELPTFFPSLEKLTLWRLDKLKGFGNRRSSSFPRLSKLEIWECPDLTWFPPCPSLKTLKLEKNNEALQIIVKITTTRGKEEKEEDKNAGVGNSQDDDNVKLRKVEIDNVSYLKSLPTNCLTHLKITGIDYREGEIESDSVEEEIELEVGEAFQKCASSLRSLIIIGNHGINKVMRLSGRTGLEHFTLLDSLELSKIEDQEDEGE

SEQ ID NO: 140 - DNA, 30 bp, Spinacia oleracea
  Primer
gcagtcgaacatgtagctgactcaggtcac

SEQ ID NO: 141 - DNA, 30 bp, Spinacia oleracea
  Primer
tggatcacttgtgcaagcatcacatcgtag

SEQ ID NO: 142 - DNA, 50 bp, Spinacia oleracea
  Primer
gcagtcgaacatgtagctgactcaggtcacacaagtggatgtgtcttagg

SEQ ID NO: 143 - DNA, 49 bp, Spinacia oleracea
  Primer
tggatcacttgtgcaagcatcacatcgtagttcgccctcatcttcctgg

SEQ ID NO: 144 - DNA, 48 bp, Spinacia oleracea
gcagtcgaacatgtagctgactcaggtcactcacgtgggttgtgttgt

SEQ ID NO: 145 - DNA, 6583 bp, Spinacia oleracea
atggccgaaatcggatactcggtttgtgcgaaactcatcgaagtgattggcagtgagctgatcaaagagatttgtgacacatggggttacaaatctcttcttgaggacctcaacaaaactgtattgacggtcaggaacgttctcattcaagccggggtgatgcgggagcttactagtgaacaacaaggtttcattgcagaccttaaagatgttgtttatgatgctgatgacttgttcgacaagttactcactcgtgctgagcgaaaacagattgatggaaacgaaatctctgaaaaggtacgtcgtttcttttcctctagtaacaagatcggtcaagcttactacatgtctcgtaaggttaaggaaattaagaagcagttggatgaaattgttgataggcatacaaaatttgggtttagtgctgagtttatacctgtttgtaggggaaggggaaacgagagggaaacacgttcatatatagatgtcaagaatattcttgggagggataaagataagaatgatatcatagataggttgcttaatcgtaatggtaatgaagcttgtagtttcctgaccatagtgggagcgggaggattgggaaaaactgctcttgcacaacttgtgttcaatgatgaaagggtcaaaattgagttccatgatttgaggtattgggtttgtgtctctgatcaagatgggggccaatttgatgtgaaagaaatcctttgtaagattttagaggtggttactaaggagaaagttgataatagttccacattggaattggtacaaagccaatttcaagagaagttaagaggaaagaagtacttccttgttcttgatgatgtatggaacgaggatcgtgagaagtggcttcctttggaagagttgttaatgttgggtcaagggggaagcaaggttgtagtgaccacacgttcagagaagacagcaaatgtcatagggaaaagacatttttatacactggaatgtttgtcaccagattattcatggagcttatttgaaatgtcggcttttcagaaagggcatgagcaggaaaaccatcacgaactagttgatattgggaaaaagattgttgaaaaatgttataacaatccacttgctataacggtggtaggaagtcttctttatggagaggagataagtaagtggcggtcatttgaaatgagtgagttggccaaaattggcaatggggataataagattttgccgatattaaagctcagttaccataatcttataccctcgttgaagagttgttttagttattgtgcagtgtttcccaaggatcatgaaataaagaaggagatgttgattgaactttggatggcacaaggatatgttgtgccgttggatggaggtcaaagtatagaagatgctgccgaggaacattttgtaattttgttacgaaggtgtttctttcaagatgtaaagaaggataaatatggtgatgttgattctgttaaaatccacgacttgatgcacgatgtcgcccaagaagtggggagggaggaattatgtgtagtgaatgataatacaaagaacttgggtgataaaatccgtcatgtacatcgtgatgtcattagatatgcacaaagagtctctctgtgtagccatagccataagattcgttcgtatattggtggtaattgtgaaaaacgttgtgtggatacactaatagacaagtggatgtgtcttaggatgttggacttgtcatggtcggatgttaaaaatttgcctaattcaataggtaaattgttgcacttgaggtatcttaacctgtcagataatagaaatctaaagatacttcctgatgcaattacaagactgcataatttgcagacactgcttttaaaagattgcagaagtttaaaggagttgccaaaagatttttgcaaattggtcaaactgagacacttggatttaaggggttgtcagtgtttgattggtatgccattgggaatggataggctaattagtcttagagtactaccaaaagttgtggtgggtaagaaggaacaaagtgatgatcagctgaaagccctaaaaggcctcaccgagataaaaggctccattgatatcacaatctattcaaagtatagaatagttgaaggcatgaatgacacaggaggagctgggtatttgaagagcatgaaacatctcacgggggttgatattacatttttgggtgaatgtgttggccctgaagctgtattggaaaccttagagccaccttcaaatatcaagagcttatatatatataattacagtggtacaacaattccagtatggggaagagcagagattaattgggcaatctccctctcacatcttgtcgacatcaagcttggttgttgtcgtaatttgcaggagatgccagtgctgagtaaactgcctcatttgaaatcgctgaaacttggatggttggataacttagagtacatggagagtagcagtagcagtgacacagaagcagcaacaccagaattaccaacattcttcccttcccttgaaaaacttactttacagcatctggaaaagttgaagggttttgggaacaggagatcgagtagttttccccgcctctctgaattggaaatcaagaaatgcccagatctaacgtcatttccttcttgtccaagccttgagaagttggaattgaaagaaagcaatgaagcattgcaaataatagtaaaaataacaacaagaggtaaagaaaaagaagagaacaataatgctggtgttagaaattcacaagatgatgacaaagtcaaattacggaagatggtgatagacaatctgggttatctcacgggggttgatattagatttgatgatagagaaggtggatttgttaaccctgaagctgtgttggcaaccctagagccaccttcaaatatcaagagcttatctatacatcgttttgatggtaaaacacttccagtatggggaagagcagagattaattgggcaatctccctctcacatcttgtcgacatccagctttggcattgtcgtaatttgcaggagatgccagtgctgagtaaactgcctcatttgaaatcactggaactttataatttgattagtttagagtacatggagagtagaagcagcagcagtagcagtgacacagaagcagcaacaccagaattaccaacattcttcccttcccttgaaaaacttacactttggtatctggaaaagttgaagggttttgggaacaggagaccgagtagttttccccgcctctctaaattggaaatctgggaatgcccagatctaacgtggtttcctccttgtccaagccttaaaacgttgaaattggaaaaaaacaatgaagcgttgcaaataatagtaaaaataacaacaacaagaggtaaagaagaaaaagaagaagacaagaatgctggtgttggaaattcacaagatgatgacaatgtcaaattacggaaggtggaaatagacaatgtgagttatctcaaatcactgcccacaaattgtcttactcacctcaaaataactggaatagattacagggagggggagattgaatcagattccgtggaggaggagattgaattggaagttggggaggcatttcagaagtgtgcatcttctttgagaagcctcatcataatcggaaatcacggaataaataaagtgatgagactgtctggaagaacagggttggagcatttcactctgttggactcactcaaactttcaaatatagaagaccaggaagatgagggcgaagacaacatcatattctggaaatcctttcctcaaaaccttcgcagtttgagaattaaagactctgacaaaatgacaagtttgcccatggggatgcagtacttaacctccctccaaaccctcgaactatcatattgtgatgaattgaattcccttccagaatggataagcagcttatcatctcttcaatacctgcgcatatactactgtccagccctgaaatcactaccagaagcaatgcggaacctcacctcccttcagacacttgggatatcggattgtccagacctagttaaaagatgcagaaaacccaacggcaaggactatcccaaaattcaacacatccccaaaattgtaagtcattgcagaaagtaatttattcatttatatttattttatgcttagaatgatatacaccgtcgtcctttggtttcaaatcttgaatttggtttttgttttctttctttgtttctttattcaacaccagcccatttatgattgattcattaaaaaaaggatggagttttatggatttgaagaagacaacgaattgagattcctggggttttctttttgttggggttggatttcatgtatatgttgctgattaaatacgagactgatgatgatgatgtgtttatgggttttaaatcagattaaatatatgggaaatgcaagttaatttgggatgcacataaggtgtttgctgaaatgtctatgagaaatgttgtttcttggacttagaatgatatacactgtcgtcctttggtttccaatcttacatttggtttgtgttttcttagtttgtttctttaatcaacaccaacccgttttttttaaactacctgcaactactaatttacgtttaccctgtatctcaggtactaaatgaatattggtgattttcagttactcaacactagcttgatcctgaacgcacccaaccttcaggttagaatccggcttactcatccttttgtccagttttcaagtaattgttttggcaggatcaattctctaattgttgtacaccgtatattgcaatttatagtgactacagttaatgaatgtttacaaaaaattagtcatgtaaaaacttcttctctgtccattacataaactctttttctctttctaacttatcatgttcatgtctaaacaattaaacatgctcacatcaatgttcatttaagctaacttacttctgtaagagagcgagctagttaaaaactcctttaactttctgttttatactcaggacatggattgatgcaagcatgaagaacttcgggaatttgctaaaactctaccaaagcgatgagagtttggactttatttcacttgaagtcagggactgtcaacaaagccacagtgtgcatgttggctgtttcacttggacgataaaaaggtttatttaattgttttcctaagtgtatttggcttacaagcttttacttttcacttgaaagggtttttcttgttttaagcttttcgaattagagttttcggttgaagtaagagtagtcgtattagtcttttacctaaggaagactcttttttgtaattttcagactatgcaattcaagttttcgagtgttttcttgcttgtgtgattgtgagttggtgaattcgtctttcatacattttgagattatcagaagctttatgctccaccggtagtctagtaccttttctgttactgtgcagggaagtaatctggtaccttctatatatatggaaaaacatacattatacattatgcaaaattcttacaggttagttacttcctggaacttcatttacacttagttttttttgttccattccctcggaatcaagtcattccctctgagaaatatgtaatgaacttctgtatgttgctgtttggttcctgttttaatcttcaattttcttgtatagttacagctgcatttacaatgaagtttaagcagacactctctttatatagtgcctctttctggagcaccgtagagctgtctgtggttgatcaccatctgctgccgagagattcagcaatcgcgtgtttgatcaggtaaaagtttttatgtcaatgtgtttttttttccgtttgatcaatttatgtctgtattcagattcttatcttcttacagtagcataacacattgtttctttcatttatgtaaactgtttcaagattacagagatgtatgcttcagtcgacattgatgataacttaagatggcattcctacaacagttgcaggcgcattctaactccggcaattctagttaggcaagaggagcattgccaatacctgccacctctgggatttactataccagggttgaagtttatggaagacaccagctatgcacaagccttcaaggggtcatcctacataacaagttgaaccaaccaattgcttgttggttcagtggtaattggagctgaatttggtagggatggcccgtgttcgatccccacaacaacaattgggaggggactggaacctatccacacagaactcgccctgaatccggattagccctaagggtgaacggggtgctaacaccaaaaaaaaaacataacaagttgaaccaaacatactttgtttgaattgaagatttagtgatttcatttgatcgattgagatgtcttattataagcgtatatgctcttggatttggccacttaggtgttgtttgacaattggacattaactcgcttttatattttcttttctcttaggaaaggtgatcctgagaatttatattggaacactttttttttctcactagctttaaaaaagtgttctgtgttacctgcaatt

SEQ ID NO: 146 - DNA, 2354 bp, Spinacia oleracea
gggtgttgttagttaggcttgaataatatagacttttaaaaaattaggctaatttgatttaaaaaattgttacatatctaagaaaattgatgttaaatttatcagtcactgtataaacaataaaagtcaatatgtatgtaaaagggttgttagataaattttttggctttttggtccacagtaagaggaactccaatgcttagttacaaggtggtgtagttaaatttgctacaaggttgtgtagttaaagagtaactccaatatattatagttaaatttaccacattaaatttctagctacaatatatttaagctataaagtttctcattggttgactataatacgttatagcaccttataatattttatttaatatacaattttatgtattttaccttttttacatttttttcgtgatctacctgctcatatgagccacactaatttggtagctgcttatacaattcttgtatcaacggttggctacttgttcaaatatttttatttttttacgagtaagtcattttatgatcattgaagttgctctaatattatcatggacctattaacgcatgaataattaactcggtaggaattagtttcaaaataaaattcccctcacaaaaaaaaaaaaaaaaaaaaatcagaaaaccaaccttctccagtttactgttgtctaaagccaaagagcatggaattttccagtaatcgcagaccccaaattctcttctccaatcgtccctgtcaatttcagcaattgaatcaatcgttgattttaggatttgccgccaaaaaaatgaaaaatccatgaattttagggttcaaatttgatccgtaattgggaaaattttcagcaattgatcttccaaatcattcatacttgtttccagactgcaaatgaaaggtgcgaactttatactgcattttgattttccattactgtaatttattaagatgaactgcattttgcaattgttttattcgactactcatctttaaatcaaattgctaaattgctagctaattttcttatcatattgccaaaaatttgttgcttaaatgattccatttctctaattatttttgttttattggtagataaataattaaggcaaatttgccaaaaaggaccttttataactcaaattttgcgagaaaggaccttatataattttttttgtgaaaacacaccttaaagttttttttttgcgagaaatgacctaaggaaagtttccggcattgactgagcttttccggccattaacttgcacgtgagcagcacgtgtggcttacgttggctaaagacactgattttcccgactcttgaattttcaaacttgattttatttcgattttttttttcaactttagttttaaagcttagaattttggaggaaaattgggtgtgattagcaaaataaagccacacgtgcttctcacgtgtaagtcaatagccaaaaaagctcagtcaatgccggaaatttacttttggttgtctttcgcaaaaagaaattatattaatgtgtgatttgacaaaaaaaaaattatataaggtcctttctcgcaaaaaattttacattaaggtgttttttgacaaaaaaagttatataaggtcctttctcgcaaaatttggattataaaaggtcctttttaacaaatttgccaataattaaatatcagccccattaattgaatattcaaaggaaatgtatggtccaaaaatggcgtttaatagtcaatgccgtgttttatggggtggtggagtactatatgactgtgtgtggacttggagaagactagagagtattgattatcaaaatatggaccctgaaaatgaaaatgaaaatgatgtttttacactttaaaatcgtcaaaaaacaaaaatcctccttagcaatagtatttacacgtgctatttgcacggacttcaatgcaatagtgtaaatttacggtcaaagttttcattctaaagcgtaaataactttcatgaatggaggacggtagtataagtataacgttatagcctacaattttcttatcatattcatataaatttgtttctaaaagttgttttacttggctaaaatacttttgttcttattggcagataaacatcagtacgtccattattggccaacttgctgagtccattattggccaacttgaacatatacctccaaacaataatcaataatgtcgattatgaagtttgtgaatgcaatttattatcactttcatttataaaatgactacttgattaacacatacaatattacctttctccaaacaccctttcaattctgcttaatcttgttttctcatcatctcttcatctttctgaaaacacaaccca

SEQ ID NO: 147 - DNA, 4146 bp, Spinacia oleracea
atggccgaaatcggatactcggtttgtgcgaaactcatcgaagtgattggcagtgagctgatcaaagagatttgtgacacatggggttacaaatctcttcttgaggacctcaacaaaactgtattgacggtcaggaacgttctcattcaagccggggtgatgcgggagcttactagtgaacaacaaggtttcattgcagaccttaaagatgttgtttatgatgctgatgacttgttcgacaagttactcactcgtgctgagcgaaaacagattgatggaaacgaaatctctgaaaaggtacgtcgtttcttttcctctagtaacaagatcggtcaagcttactacatgtctcgtaaggttaaggaaattaagaagcagttggatgaaattgttgataggcatacaaaatttgggtttagtgctgagtttatacctgtttgtaggggaaggggaaacgagagggaaacacgttcatatatagatgtcaagaatattcttgggagggataaagataagaatgatatcatagataggttgcttaatcgtaatggtaatgaagcttgtagtttcctgaccatagtgggagcgggaggattgggaaaaactgctcttgcacaacttgtgttcaatgatgaaagggtcaaaattgagttccatgatttgaggtattgggtttgtgtctctgatcaagatgggggccaatttgatgtgaaagaaatcctttgtaagattttagaggtggttactaaggagaaagttgataatagttccacattggaattggtacaaagccaatttcaagagaagttaagaggaaagaagtacttccttgttcttgatgatgtatggaacgaggatcgtgagaagtggcttcctttggaagagttgttaatgttgggtcaagggggaagcaaggttgtagtgaccacacgttcagagaagacagcaaatgtcatagggaaaagacatttttatacactggaatgtttgtcaccagattattcatggagcttatttgaaatgtcggcttttcagaaagggcatgagcaggaaaaccatcacgaactagttgatattgggaaaaagattgttgaaaaatgttataacaatccacttgctataacggtggtaggaagtcttctttatggagaggagataagtaagtggcggtcatttgaaatgagtgagttggccaaaattggcaatggggataataagattttgccgatattaaagctcagttaccataatcttataccctcgttgaagagttgttttagttattgtgcagtgtttcccaaggatcatgaaataaagaaggagatgttgattgaactttggatggcacaaggatatgttgtgccgttggatggaggtcaaagtatagaagatgctgccgaggaacattttgtaattttgttacgaaggtgtttctttcaagatgtaaagaaggataaatatggtgatgttgattctgttaaaatccacgacttgatgcacgatgtcgcccaagaagtggggagggaggaattatgtgtagtgaatgataatacaaagaacttgggtgataaaatccgtcatgtacatcgtgatgtcattagatatgcacaaagagtctctctgtgtagccatagccataagattcgttcgtatattggtggtaattgtgaaaaacgttgtgtggatacactaatagacaagtggatgtgtcttaggatgttggacttgtcatggtcggatgttaaaaatttgcctaattcaataggtaaattgttgcacttgaggtatcttaacctgtcagataatagaaatctaaagatacttcctgatgcaattacaagactgcataatttgcagacactgcttttaaaagattgcagaagtttaaaggagttgccaaaagatttttgcaaattggtcaaactgagacacttggatttaaggggttgtcagtgtttgattggtatgccattgggaatggataggctaattagtcttagagtactaccaaaagttgtggtgggtaagaaggaacaaagtgatgatcagctgaaagccctaaaaggcctcaccgagataaaaggctccattgatatcacaatctattcaaagtatagaatagttgaaggcatgaatgacacaggaggagctgggtatttgaagagcatgaaacatctcacgggggttgatattacatttttgggtgaatgtgttggccctgaagctgtattggaaaccttagagccaccttcaaatatcaagagcttatatatatataattacagtggtacaacaattccagtatggggaagagcagagattaattgggcaatctccctctcacatcttgtcgacatcaagcttggttgttgtcgtaatttgcaggagatgccagtgctgagtaaactgcctcatttgaaatcgctgaaacttggatggttggataacttagagtacatggagagtagcagtagcagtgacacagaagcagcaacaccagaattaccaacattcttcccttcccttgaaaaacttactttacagcatctggaaaagttgaagggttttgggaacaggagatcgagtagttttccccgcctctctgaattggaaatcaagaaatgcccagatctaacgtcatttccttcttgtccaagccttgagaagttggaattgaaagaaagcaatgaagcattgcaaataatagtaaaaataacaacaagaggtaaagaaaaagaagagaacaataatgctggtgttagaaattcacaagatgatgacaaagtcaaattacggaagatggtgatagacaatctgggttatctcacgggggttgatattagatttgatgatagagaaggtggatttgttaaccctgaagctgtgttggcaaccctagagccaccttcaaatatcaagagcttatctatacatcgttttgatggtaaaacacttccagtatggggaagagcagagattaattgggcaatctccctctcacatcttgtcgacatccagctttggcattgtcgtaatttgcaggagatgccagtgctgagtaaactgcctcatttgaaatcactggaactttataatttgattagtttagagtacatggagagtagaagcagcagcagtagcagtgacacagaagcagcaacaccagaattaccaacattcttcccttcccttgaaaaacttacactttggtatctggaaaagttgaagggttttgggaacaggagaccgagtagttttccccgcctctctaaattggaaatctgggaatgcccagatctaacgtggtttcctccttgtccaagccttaaaacgttgaaattggaaaaaaacaatgaagcgttgcaaataatagtaaaaataacaacaacaagaggtaaagaagaaaaagaagaagacaagaatgctggtgttggaaattcacaagatgatgacaatgtcaaattacggaaggtggaaatagacaatgtgagttatctcaaatcactgcccacaaattgtcttactcacctcaaaataactggaatagattacagggagggggagattgaatcagattccgtggaggaggagattgaattggaagttggggaggcatttcagaagtgtgcatcttctttgagaagcctcatcataatcggaaatcacggaataaataaagtgatgagactgtctggaagaacagggttggagcatttcactctgttggactcactcaaactttcaaatatagaagaccaggaagatgagggcgaagacaacatcatattctggaaatcctttcctcaaaaccttcgcagtttgagaattaaagactctgacaaaatgacaagtttgcccatggggatgcagtacttaacctccctccaaaccctcgaactatcatattgtgatgaattgaattcccttccagaatggataagcagcttatcatctcttcaatacctgcgcatatactactgtccagccctgaaatcactaccagaagcaatgcggaacctcacctcccttcagacacttgggatatcggattgtccagacctagttaaaagatgcagaaaacccaacggcaaggactatcccaaaattcaacacatccccaaaattgtactaaatgaatattggtga

SEQ ID NO: 148 - DNA, 4179 bp, Spinacia oleracea
atggccgaaatcggatactcggtttgtgcgaaactcatcgaagtgattggcagtgagctgatcaaagagatttgtgacacatggggttacaaatctcttcttgaggacctcaacaaaactgtattgacggtcaggaacgttctcattcaagccggggtgatgcgggagcttactagtgaacaacaaggtttcattgcagaccttaaagatgttgtttatgatgctgatgacttgttcgacaagttactcactcgtgctgagcgaaaacagattgatggaaacgaaatctctgaaaaggtacgtcgtttcttttcctctagtaacaagatcggtcaagcttactacatgtctcgtaaggttaaggaaattaagaagcagttggatgaaattgttgataggcatacaaaatttgggtttagtgctgagtttatacctgtttgtaggggaaggggaaacgagagggaaacacgttcatatatagatgtcaagaatattcttgggagggataaagataagaatgatatcatagataggttgcttaatcgtaatggtaatgaagcttgtagtttcctgaccatagtgggagcgggaggattgggaaaaactgctcttgcacaacttgtgttcaatgatgaaagggtcaaaattgagttccatgatttgaggtattgggtttgtgtctctgatcaagatgggggccaatttgatgtgaaagaaatcctttgtaagattttagaggtggttactaaggagaaagttgataatagttccacattggaattggtacaaagccaatttcaagagaagttaagaggaaagaagtacttccttgttcttgatgatgtatggaacgaggatcgtgagaagtggcttcctttggaagagttgttaatgttgggtcaagggggaagcaaggttgtagtgaccacacgttcagagaagacagcaaatgtcatagggaaaagacatttttatacactggaatgtttgtcaccagattattcatggagcttatttgaaatgtcggcttttcagaaagggcatgagcaggaaaaccatcacgaactagttgatattgggaaaaagattgttgaaaaatgttataacaatccacttgctataacggtggtaggaagtcttctttatggagaggagataagtaagtggcggtcatttgaaatgagtgagttggccaaaattggcaatggggataataagattttgccgatattaaagctcagttaccataatcttataccctcgttgaagagttgttttagttattgtgcagtgtttcccaaggatcatgaaataaagaaggagatgttgattgaactttggatggcacaaggatatgttgtgccgttggatggaggtcaaagtatagaagatgctgccgaggaacattttgtaattttgttacgaaggtgtttctttcaagatgtaaagaaggataaatatggtgatgttgattctgttaaaatccacgacttgatgcacgatgtcgcccaagaagtggggagggaggaattatgtgtagtgaatgataatacaaagaacttgggtgataaaatccgtcatgtacatcgtgatgtcattagatatgcacaaagagtctctctgtgtagccatagccataagattcgttcgtatattggtggtaattgtgaaaaacgttgtgtggatacactaatagacaagtggatgtgtcttaggatgttggacttgtcatggtcggatgttaaaaatttgcctaattcaataggtaaattgttgcacttgaggtatcttaacctgtcagataatagaaatctaaagatacttcctgatgcaattacaagactgcataatttgcagacactgcttttaaaagattgcagaagtttaaaggagttgccaaaagatttttgcaaattggtcaaactgagacacttggatttaaggggttgtcagtgtttgattggtatgccattgggaatggataggctaattagtcttagagtactaccaaaagttgtggtgggtaagaaggaacaaagtgatgatcagctgaaagccctaaaaggcctcaccgagataaaaggctccattgatatcacaatctattcaaagtatagaatagttgaaggcatgaatgacacaggaggagctgggtatttgaagagcatgaaacatctcacgggggttgatattacatttttgggtgaatgtgttggccctgaagctgtattggaaaccttagagccaccttcaaatatcaagagcttatatatatataattacagtggtacaacaattccagtatggggaagagcagagattaattgggcaatctccctctcacatcttgtcgacatcaagcttggttgttgtcgtaatttgcaggagatgccagtgctgagtaaactgcctcatttgaaatcgctgaaacttggatggttggataacttagagtacatggagagtagcagtagcagtgacacagaagcagcaacaccagaattaccaacattcttcccttcccttgaaaaacttactttacagcatctggaaaagttgaagggttttgggaacaggagatcgagtagttttccccgcctctctgaattggaaatcaagaaatgcccagatctaacgtcatttccttcttgtccaagccttgagaagttggaattgaaagaaagcaatgaagcattgcaaataatagtaaaaataacaacaagaggtaaagaaaaagaagagaacaataatgctggtgttagaaattcacaagatgatgacaaagtcaaattacggaagatggtgatagacaatctgggttatctcacgggggttgatattagatttgatgatagagaaggtggatttgttaaccctgaagctgtgttggcaaccctagagccaccttcaaatatcaagagcttatctatacatcgttttgatggtaaaacacttccagtatggggaagagcagagattaattgggcaatctccctctcacatcttgtcgacatccagctttggcattgtcgtaatttgcaggagatgccagtgctgagtaaactgcctcatttgaaatcactggaactttataatttgattagtttagagtacatggagagtagaagcagcagcagtagcagtgacacagaagcagcaacaccagaattaccaacattcttcccttcccttgaaaaacttacactttggtatctggaaaagttgaagggttttgggaacaggagaccgagtagttttccccgcctctctaaattggaaatctgggaatgcccagatctaacgtggtttcctccttgtccaagccttaaaacgttgaaattggaaaaaaacaatgaagcgttgcaaataatagtaaaaataacaacaacaagaggtaaagaagaaaaagaagaagacaagaatgctggtgttggaaattcacaagatgatgacaatgtcaaattacggaaggtggaaatagacaatgtgagttatctcaaatcactgcccacaaattgtcttactcacctcaaaataactggaatagattacagggagggggagattgaatcagattccgtggaggaggagattgaattggaagttggggaggcatttcagaagtgtgcatcttctttgagaagcctcatcataatcggaaatcacggaataaataaagtgatgagactgtctggaagaacagggttggagcatttcactctgttggactcactcaaactttcaaatatagaagaccaggaagatgagggcgaagacaacatcatattctggaaatcctttcctcaaaaccttcgcagtttgagaattaaagactctgacaaaatgacaagtttgcccatggggatgcagtacttaacctccctccaaaccctcgaactatcatattgtgatgaattgaattcccttccagaatggataagcagcttatcatctcttcaatacctgcgcatatactactgtccagccctgaaatcactaccagaagcaatgcggaacctcacctcccttcagacacttgggatatcggattgtccagacctagttaaaagatgcagaaaacccaacggcaaggactatcccaaaattcaacacatccccaaaattttactcaacactagcttgatcctgaacgcacccaaccttcaggacatggattga

SEQ ID NO: 149 - protein, 1381 aa, Spinacia oleracea
MAEIGYSVCAKLIEVIGSELIKEICDTWGYKSLLEDLNKTVLTVRNVLIQAGVMRELTSEQQGFIADLKDVVYDADDLFDKLLTRAERKQIDGNEISEKVRRFFSSSNKIGQAYYMSRKVKEIKKQLDEIVDRHTKFGFSAEFIPVCRGRGNERETRSYIDVKNILGRDKDKNDIIDRLLNRNGNEACSFLTIVGAGGLGKTALAQLVFNDERVKIEFHDLRYWVCVSDQDGGQFDVKEILCKILEVVTKEKVDNSSTLELVQSQFQEKLRGKKYFLVLDDVWNEDREKWLPLEELLMLGQGGSKVVVTTRSEKTANVIGKRHFYTLECLSPDYSWSLFEMSAFQKGHEQENHHELVDIGKKIVEKCYNNPLAITVVGSLLYGEEISKWRSFEMSELAKIGNGDNKILPILKLSYHNLIPSLKSCFSYCAVFPKDHEIKKEMLIELWMAQGYVVPLDGGQSIEDAAEEHFVILLRRCFFQDVKKDKYGDVDSVKIHDLMHDVAQEVGREELCVVNDNTKNLGDKIRHVHRDVIRYAQRVSLCSHSHKIRSYIGGNCEKRCVDTLIDKWMCLRMLDLSWSDVKNLPNSIGKLLHLRYLNLSDNRNLKILPDAITRLHNLQTLLLKDCRSLKELPKDFCKLVKLRHLDLRGCQCLIGMPLGMDRLISLRVLPKVVVGKKEQSDDQLKALKGLTEIKGSIDITIYSKYRIVEGMNDTGGAGYLKSMKHLTGVDITFLGECVGPEAVLETLEPPSNIKSLYIYNYSGTTIPVWGRAEINWAISLSHLVDIKLGCCRNLQEMPVLSKLPHLKSLKLGWLDNLEYMESSSSSDTEAATPELPTFFPSLEKLTLQHLEKLKGFGNRRSSSFPRLSELEIKKCPDLTSFPSCPSLEKLELKESNEALQIIVKITTRGKEKEENNNAGVRNSQDDDKVKLRKMVIDNLGYLTGVDIRFDDREGGFVNPEAVLATLEPPSNIKSLSIHRFDGKTLPVWGRAEINWAISLSHLVDIQLWHCRNLQEMPVLSKLPHLKSLELYNLISLEYMESRSSSSSSDTEAATPELPTFFPSLEKLTLWYLEKLKGFGNRRPSSFPRLSKLEIWECPDLTWFPPCPSLKTLKLEKNNEALQIIVKITTTRGKEEKEEDKNAGVGNSQDDDNVKLRKVEIDNVSYLKSLPTNCLTHLKITGIDYREGEIESDSVEEEIELEVGEAFQKCASSLRSLIIIGNHGINKVMRLSGRTGLEHFTLLDSLKLSNIEDQEDEGEDNIIFWKSFPQNLRSLRIKDSDKMTSLPMGMQYLTSLQTLELSYCDELNSLPEWISSLSSLQYLRIYYCPALKSLPEAMRNLTSLQTLGISDCPDLVKRCRKPNGKDYPKIQHIPKIVLNEYW

SEQ ID NO: 150 - protein, 1392 aa, Spinacia oleracea
MAEIGYSVCAKLIEVIGSELIKEICDTWGYKSLLEDLNKTVLTVRNVLIQAGVMRELTSEQQGFIADLKDVVYDADDLFDKLLTRAERKQIDGNEISEKVRRFFSSSNKIGQAYYMSRKVKEIKKQLDEIVDRHTKFGFSAEFIPVCRGRGNERETRSYIDVKNILGRDKDKNDIIDRLLNRNGNEACSFLTIVGAGGLGKTALAQLVFNDERVKIEFHDLRYWVCVSDQDGGQFDVKEILCKILEVVTKEKVDNSSTLELVQSQFQEKLRGKKYFLVLDDVWNEDREKWLPLEELLMLGQGGSKVVVTTRSEKTANVIGKRHFYTLECLSPDYSWSLFEMSAFQKGHEQENHHELVDIGKKIVEKCYNNPLAITVVGSLLYGEEISKWRSFEMSELAKIGNGDNKILPILKLSYHNLIPSLKSCFSYCAVFPKDHEIKKEMLIELWMAQGYVVPLDGGQSIEDAAEEHFVILLRRCFFQDVKKDKYGDVDSVKIHDLMHDVAQEVGREELCVVNDNTKNLGDKIRHVHRDVIRYAQRVSLCSHSHKIRSYIGGNCEKRCVDTLIDKWMCLRMLDLSWSDVKNLPNSIGKLLHLRYLNLSDNRNLKILPDAITRLHNLQTLLLKDCRSLKELPKDFCKLVKLRHLDLRGCQCLIGMPLGMDRLISLRVLPKVVVGKKEQSDDQLKALKGLTEIKGSIDITIYSKYRIVEGMNDTGGAGYLKSMKHLTGVDITFLGECVGPEAVLETLEPPSNIKSLYIYNYSGTTIPVWGRAEINWAISLSHLVDIKLGCCRNLQEMPVLSKLPHLKSLKLGWLDNLEYMESSSSSDTEAATPELPTFFPSLEKLTLQHLEKLKGFGNRRSSSFPRLSELEIKKCPDLTSFPSCPSLEKLELKESNEALQIIVKITTRGKEKEENNNAGVRNSQDDDKVKLRKMVIDNLGYLTGVDIRFDDREGGFVNPEAVLATLEPPSNIKSLSIHRFDGKTLPVWGRAEINWAISLSHLVDIQLWHCRNLQEMPVLSKLPHLKSLELYNLISLEYMESRSSSSSSDTEAATPELPTFFPSLEKLTLWYLEKLKGFGNRRPSSFPRLSKLEIWECPDLTWFPPCPSLKTLKLEKNNEALQIIVKITTTRGKEEKEEDKNAGVGNSQDDDNVKLRKVEIDNVSYLKSLPTNCLTHLKITGIDYREGEIESDSVEEEIELEVGEAFQKCASSLRSLIIIGNHGINKVMRLSGRTGLEHFTLLDSLKLSNIEDQEDEGEDNIIFWKSFPQNLRSLRIKDSDKMTSLPMGMQYLTSLQTLELSYCDELNSLPEWISSLSSLQYLRIYYCPALKSLPEAMRNLTSLQTLGISDCPDLVKRCRKPNGKDYPKIQHIPKILLNTSLILNAPNLQDMD

SEQ ID NO: 151 - DNA, 2078 bp, Spinacia oleracea
acaagtggatgtgtcttaggatgttggacttgtcatggtcggatgttaaaaatttgcctaattcaataggtaaattgttgcacttgaggtatcttaacctgtcagataatagaaatctaaagatacttcctgatgcaattacaagactgcataatttgcagacactgcttttaaaagattgcagaagtttaaaggagttgccaaaagatttttgcaaattggtcaaactgagacacttggatttaaggggttgtcagtgtttgattggtatgccattgggaatggataggctaattagtcttagagtactaccaaaagttgtggtgggtaagaaggaacaaagtgatgatcagctgaaagccctaaaaggcctcaccgagataaaaggctccattgatatcacaatctattcaaagtatagaatagttgaaggcatgaatgacacaggaggagctgggtatttgaagagcatgaaacatctcacgggggttgatattacatttttgggtgaatgtgttggccctgaagctgtattggaaaccttagagccaccttcaaatatcaagagcttatatatatataattacagtggtacaacaattccagtatggggaagagcagagattaattgggcaatctccctctcacatcttgtcgacatcaagcttggttgttgtcgtaatttgcaggagatgccagtgctgagtaaactgcctcatttgaaatcgctgaaacttggatggttggataacttagagtacatggagagtagcagtagcagtgacacagaagcagcaacaccagaattaccaacattcttcccttcccttgaaaaacttactttacagcatctggaaaagttgaagggttttgggaacaggagatcgagtagttttccccgcctctctgaattggaaatcaagaaatgcccagatctaacgtcatttccttcttgtccaagccttgagaagttggaattgaaagaaagcaatgaagcattgcaaataatagtaaaaataacaacaagaggtaaagaaaaagaagagaacaataatgctggtgttagaaattcacaagatgatgacaaagtcaaattacggaagatggtgatagacaatctgggttatctcacgggggttgatattagatttgatgatagagaaggtggatttgttaaccctgaagctgtgttggcaaccctagagccaccttcaaatatcaagagcttatctatacatcgttttgatggtaaaacacttccagtatggggaagagcagagattaattgggcaatctccctctcacatcttgtcgacatccagctttggcattgtcgtaatttgcaggagatgccagtgctgagtaaactgcctcatttgaaatcactggaactttataatttgattagtttagagtacatggagagtagaagcagcagcagtagcagtgacacagaagcagcaacaccagaattaccaacattcttcccttcccttgaaaaacttacactttggtatctggaaaagttgaagggttttgggaacaggagaccgagtagttttccccgcctctctaaattggaaatctgggaatgcccagatctaacgtggtttcctccttgtccaagccttaaaacgttgaaattggaaaaaaacaatgaagcgttgcaaataatagtaaaaataacaacaacaagaggtaaagaagaaaaagaagaagacaagaatgctggtgttggaaattcacaagatgatgacaatgtcaaattacggaaggtggaaatagacaatgtgagttatctcaaatcactgcccacaaattgtcttactcacctcaaaataactggaatagattacagggagggggagattgaatcagattccgtggaggaggagattgaattggaagttggggaggcatttcagaagtgtgcatcttctttgagaagcctcatcataatcggaaatcacggaataaataaagtgatgagactgtctggaagaacagggttggagcatttcactctgttggactcactcaaactttcaaatatagaagaccaggaagatgagggcgaa

SEQ ID NO: 152 - protein, 692 aa, Spinacia oleracea
KWMCLRMLDLSWSDVKNLPNSIGKLLHLRYLNLSDNRNLKILPDAITRLHNLQTLLLKDCRSLKELPKDFCKLVKLRHLDLRGCQCLIGMPLGMDRLISLRVLPKVVVGKKEQSDDQLKALKGLTEIKGSIDITIYSKYRIVEGMNDTGGAGYLKSMKHLTGVDITFLGECVGPEAVLETLEPPSNIKSLYIYNYSGTTIPVWGRAEINWAISLSHLVDIKLGCCRNLQEMPVLSKLPHLKSLKLGWLDNLEYMESSSSSDTEAATPELPTFFPSLEKLTLQHLEKLKGFGNRRSSSFPRLSELEIKKCPDLTSFPSCPSLEKLELKESNEALQIIVKITTRGKEKEENNNAGVRNSQDDDKVKLRKMVIDNLGYLTGVDIRFDDREGGFVNPEAVLATLEPPSNIKSLSIHRFDGKTLPVWGRAEINWAISLSHLVDIQLWHCRNLQEMPVLSKLPHLKSLELYNLISLEYMESRSSSSSSDTEAATPELPTFFPSLEKLTLWYLEKLKGFGNRRPSSFPRLSKLEIWECPDLTWFPPCPSLKTLKLEKNNEALQIIVKITTTRGKEEKEEDKNAGVGNSQDDDNVKLRKVEIDNVSYLKSLPTNCLTHLKITGIDYREGEIESDSVEEEIELEVGEAFQKCASSLRSLIIIGNHGINKVMRLSGRTGLEHFTLLDSLKLSNIEDQEDEGE

SEQ ID NO: 153 - DNA, 2078 bp, Spinacia oleracea
acaagtggatgtgtcttaggatgttggacttgtcatggtcggatgttaaaaatttgcctaattcaataggtaaattgttgcacttgaggtgtcttaacctgtcttataataaagatctgttgatactccctgatgcaattacaagactgcataatttgcagacactgcttttaaaagagtgcagaagtttaaaggagttgccaaaagatttttgcaaattggtcaaactgagacacttggaattacagggttgtcatgatttgattggtatgccatttggaatggataagctaactagtcttagaatactaccaaacattgtggtgggtaggaaggaacaaagtgatgatgagctgaaagccctaaaaggcctcaccgagataaaaggctccatttctatcagaatctattcaaagtatagaatagttgaaggcatgaatgacacaggaggagctgcttatttgaagagcatgaaacatctcagggagattgatattacatttttgggtgaatgtgttggccctgaagctgtattggaaaccttagagccaccttcaaatatcaagagcttatatatatataattacagtggtacaacaattccagtatggggaagagcagagattaattgggcaatctccctctcacatctcgtcgacatccagcttagttgttgtagtaatttgcaggagatgccagtgctgagtaaactgcctcatttgaaatcgctgaaacttggatggttggataacttagagtacatggagagtagcagtagcagtgacacagaagcagcaacaccagaattaccaacattcttcccttcccttgaaaaacttactttacagcatctggaaaagttgaagggttttgggaacaggagatcgagtagttttccccgcctctctgaattggaaatcaagaaatgcccagatctaacgtcatttccttcttgtccaagccttgagaagttggaattgaaagaaagcaatgaagcattgcaaataatagtaaaaataacaacaagaggtaaagaaaaagaagagaacaataatgctggtgttagaaattcacaagatgatgacaaagtcaaattacggaagatggtgatagacaatctgggttatctcacgggggttgatattagatttgatgatagagaaggtggatttgttaaccctgaagctgtgttggcaaccctagagccaccttcaaatatcaagagcttatctatacatcgttttgatggtaaaacacttccagtatggggaagagcagagattaattgggcaatctccctctcacatcttgtcgacatcaagcttagttgttgtcgtaatttgcaggagatgccagtgctgagtaaactgcctcatttgaaatcactggaacttcgatgtttggaaaacttagagtacatggagagtacaagcagaagcagtagcagtgacacagaagcagcaacaccagaattaccaacattcttcccttcccttgaaaaacttagactttggtatctggaaaagttgaagggtttggggaacaggagaccgagtagttttccccgcctctctgaattggaaatctgggaatgcccagatctaacgtggtttcctccttgtccaagccttaaaacgttgaaattggaaaaaaacaatgaagcgttgcaaataatagtaaaaataacaacaacaagaggtaaagaagaaaaagaagaagacaagaatgctggtgttggaaattcacaagatgatgacaatgtcaaattacggaaggtggaaatagacaatgtgagttatctcaaatcactgcccacaaattgtcttactcacctcaaaataactggaatagattacagggagggggagattgaatcagattccgtggaggaggagattgaattggaagttggggaggcatttcagaagtgtgcatcttctttgagaagcctcatcataatcggaaatcacggaataaataaagtgatgagactgtctggaagaacagggttggagcatttcactctgttggactcactcaaactttcaaatatagaagaccaggaagatgagggcgaa

SEQ ID NO: 154 - protein, 692 aa, Spinacia oleracea
KWMCLRMLDLSWSDVKNLPNSIGKLLHLRCLNLSYNKDLLILPDAITRLHNLQTLLLKECRSLKELPKDFCKLVKLRHLELQGCHDLIGMPFGMDKLTSLRILPNIVVGRKEQSDDELKALKGLTEIKGSISIRIYSKYRIVEGMNDTGGAAYLKSMKHLREIDITFLGECVGPEAVLETLEPPSNIKSLYIYNYSGTTIPVWGRAEINWAISLSHLVDIQLSCCSNLQEMPVLSKLPHLKSLKLGWLDNLEYMESSSSSDTEAATPELPTFFPSLEKLTLQHLEKLKGFGNRRSSSFPRLSELEIKKCPDLTSFPSCPSLEKLELKESNEALQIIVKITTRGKEKEENNNAGVRNSQDDDKVKLRKMVIDNLGYLTGVDIRFDDREGGFVNPEAVLATLEPPSNIKSLSIHRFDGKTLPVWGRAEINWAISLSHLVDIKLSCCRNLQEMPVLSKLPHLKSLELRCLENLEYMESTSRSSSSDTEAATPELPTFFPSLEKLRLWYLEKLKGLGNRRPSSFPRLSELEIWECPDLTWFPPCPSLKTLKLEKNNEALQIIVKITTTRGKEEKEEDKNAGVGNSQDDDNVKLRKVEIDNVSYLKSLPTNCLTHLKITGIDYREGEIESDSVEEEIELEVGEAFQKCASSLRSLIIIGNHGINKVMRLSGRTGLEHFTLLDSLKLSNIEDQEDEGE

SEQ ID NO: 155 - DNA, 7138 bp, Spinacia oleracea
atggccgaaatcggatactcggtttgtgcgaaactcatcgaagtgattggcagtgagctgatcaaagagatttgtgacacatggggttacaaatctcttcttgaggacctcaacaaaactgtattgacggtcaggaacgttctcattcaagccggggtgatgcgggagcttactagtgaacaacaaggtttcattgcagaccttaaagatgttgtttatgatgctgatgacttgttcgacaagttactcactcgtgctgagcgaaaacagattgatggaaacgaaatctctgaaaaggtacgtcgtttcttttcctctagtaacaagatcggtcaagcttactacatgtctcgtaaggttaaggaaattaagaagcagttggatgaaattgttgataggcatacaaaatttgggtttagtgctgagtttatacctgtttgtaggggaaggggaaacgagagggaaacacgttcatatatagatgtcaagaatattcttgggagggataaagataagaatgatatcatagataggttgcttaatcgtaatggtaatgaagcttgtagtttcctgaccatagtgggagcgggaggattgggaaaaactgctcttgcacaacttgtgttcaatgatgaaagggtcaaaattgagttccatgatttgaggtattgggtttgtgtctctgatcaagatgggggccaatttgatgtgaaagaaatcctttgtaagattttagaggtggttactaaggagaaagttgataatagttccacattggaattggtacaaagccaatttcaagagaagttaagaggaaagaagtacttccttgttcttgatgatgtatggaacgaggatcgtgagaagtggcttcctttggaagagttgttaatgttgggtcaagggggaagcaaggttgtagtgaccacacgttcagagaagacagcaaatgtcatagggaaaagacatttttatacactggaatgtttgtcaccagattattcatggagcttatttgaaatgtcggcttttcagaaagggcatgagcaggaaaaccatcacgaactagttgatattgggaaaaagattgttgaaaaatgttataacaatccacttgctataacggtggtaggaagtcttctttatggagaggagataagtaagtggcggtcatttgaaatgagtgagttggccaaaattggcaatggggataataagattttgccgatattaaagctcagttaccataatcttataccctcgttgaagagttgcttcagttattgtgcagtgtttcccaaggatcatgaaataaagaaggagatgttgatttatctttggatggcacaaggatatgttgtgccgttggatggaggtcaaagtatagaagatgctgccgaggaacattttgtaattttgttacgaaggtgtttctttcaagatgtaaagaaggataaatatggtgatgttgattctgttaaaatccacgacttgatgcacgatgtcgcccaagaagtggggagggaggaattatgtgtagtgaatgataatacaaagaacttgggtgataaaatccgtcatgtacatcgtgatgtcattagatatgcacaaagagtctctctgtgtagccatagccataagattcgttcgtatattggtggtaattgtgaaaaacgttgtgtggatacactaatagacaagtggatgtgtcttaggatgttggacttgtcatggtcggatgttaaaaatttgcctaattcaataggtaaattgttgcacttgaggtatcttaacctgtcagataatagaaatctaaagatacttcctgatgcaattacaagactgcataatttgcagacactgcttttaaaagattgcagaagtttaaaggagttgccaaaagatttttgcaaattggtcaaactgagacacttggatttaaggggttgtcagtgtttgattggtatgccattgggaatggataggctaattagtcttagagtactaccaaaagttgtggtgggtaagaaggaacaaagtgatgatcagctgaaagccctaaaaggcctcaccgagataaaaggctccattgatatcacaatctattcaaagtatagaatagttgaaggcatgaatgacacaggaggagctgggtatttgaagagcatgaaacatctcacgggggttgatattacatttttgggtgaatgtgttaaccctgaagctgtgttggcaaccctagagccaccttcaaatatcaagagcttatctatacatcgttttgatggtaaaacacttccagtatggggaagagcagagattaattgggcaatctccctctcacatcttgtcgacatcaagcttagttgttgtcgtaatttgcaggagatgccagtgctgagtaaactgcctcatttgaaatcactggaacttcgatgtttggaaaacttagagtacatggagagtagaagcagcagcagtagcagtgacaaagaagcagcaacaccagaattaccaacattcttcccttcccttgaaaaacttacactttggtatctggaaaagttgaagggtttggggaacaggagatcgagtagttttccccgcctctctaaattggaaatccgggaatgcccagatctaacgtggtttcctccttgtccaagccttgaaacgttgaaattggaaaaaaacaatgaagcgttgcaaaaaataacaacaacaagaggtaaagaagaaaaagaagaagacaagaatgctggtgttggaaattcacaagatgatgacaatgtcaaattacggaaggtgaaaatagacaatctgggttatctcaaatcactgcccacaaattgtcttactcacctcgaccttacaataagagattccaaggagggggagggtgaatgggaagttggggatgcatttcagaagtgtgtatcttctttgagaagcctcaccataatcggaaatcacggaataaataaagtgaagagactgtctggaagaacagggttggagcatttcactctgttggactcactcaaattttcaaagatagaagaccaggaagatgagggcgaagacaacatcatgttctggaaaacctttcctcaaaacctccgcagtttgagaattaaagactctgacaaaatgacaagtttgcccatggggatgcagtacttaacctccctccaaaccctctatctacaccattgttatgaattgaattcccttccagaatggataagcagcttatcatctcttcaatccctgtacatatacaaatgtccagccctaaaatcactaccagaagcaatgcggaacctcacctcccttcagagccttgtgatacggcggtgtccagacctaattgaaagatgcgaagaacccaacggcgaggactatcccaaaattcgacacatctccagaattgtaagtcattgcagaaagtatttcttttttttctttttttattttatacttagaatgatatacaccgtcgtccttaggtttcaaatcttgaatttggtttttgttttctttctttgtttctttattcaacaccagtccatttatgattgattcattaaaaaaaggatggagttttatggatttgaagaagacaacgaattgagattcctggggttttttttttcgttggggttggttttcatgtatatgttgctgattaaatacgagactgatgatgatgatgtgtttatgggttttaaatcagattaaatatatgggaaatgcaagttaatttgggatgcacataaggtgtttgctgaaatgtctatgagaaatgttgtttcttggacttagaatgatatacactgtcgtcctttggtttccaatcttacatttggtttgtgttttcttagtttgtttctttaatcaacaccaacccgttttttttaaactacctgcaactactaatttacgtttaccctgtatctcaggtactaaatgaatattggtgattttcagttactcaacactagcttgatcctgaacgcacccaaccttcaggttagaatccggcttactcatccttttgtccagttttcaagtaattgttttggcaggatcaattctctaattgttgtacaccgtatattgcaatttatagtgactacagttaatgaatgtttacaaaaaattagtcatgtaaaaacttcttctctgtccattacataaactctttttctctttctaacttatcatgttcatgtctaaacaattaaacatgctcacatcaatgttcatttaagctaacttacttctgtaagagagcgagctagttaaaaactcctttaactttctgttttatactcaggacatggattgatgcaagcatgaagaacttcgggaatttgctaaaactctaccaaagcgatgagagtttggactttgtttcacttgaagtcagggactgtcaacaaagccacagtgtgcatgttggctgtttcacttggacgataaaaaggtttatttaattgttttcctaagtgtatttggcttacaagcttttacttttcgcttgaaagggtttttcttgttttaagctttttgaattagagtttcggttgaagtaagagtagtcgtattagtcttttactttgcaggagtctatgcctatataaggtaagactcgtatttgtaattttcagattatgcaattcaagttttcgagtgttttcttaaaaaaacatatcatacctgtgtgtagcataaagataaattctgatgctgtgcttctggttatggctcacattggttttcattgtttggattgtttcacagggaagcagagaatacctggaacctgtaaaggacgctatatctatagcagctttcacaggccaagtaatataatgttctttatcaatcactcaatacctggagattgtttgaacacataattcacctctttttttccatctcaaattgcagacttttactgggatttgaatgacagcaaacatttgattgtcacgaggattgatctaactggtgaatgttgtgatcaccatattggtctttctcattcaaacaaacttgcataccgttcttttgcagtttgaagacaagcaggcgataatcaactcaggtcgaagctcatgtgcaggagagaatagaatatagaggagattatttttaaaagaaacgctcaaaggtattgtagcacctttcctatttgctactgcagtgatgtttttatttcttgtttgcagcgcttgtttctcatatttcaacctacttttagaaaaaaaaacatctccgaacataaccaaaaataaagttcccttatcagtgctttctctgcttcttctaaacaacatatacaattataaaccctttttctctcttacctttgttattcttccttgcttcattgagataacactctcctgtttttgttttgttgttagtcattacatggatatatcaaggacaacagttctgtagtccgtcaactgtggttaggaaggctaaactggagcacaataaccccatgtcaattgaatagtaaaggtgtgctatatcagtttcgtttggcttggcttgtttacctgaaaaatggctggttatttatccttgtctctttctatgacgtgcagtggcttgttaatgtgtctcggacaacaattcctcactttccaagttccatacacgctgatgtaactatcttctgcagtctgttctttcatttttgccacgtgctctaattataactttttgtactcaataatcaactccttgtcccggtatttgcagagactacttaaacaggtaaagtgacaatcctggcgaagttgtctgtttcttagctctgaacccatcattcaggtaagattaagtatttaagaagaaattttgtttttacctaaaatgaatgatcttgtgtaactgcttgcttcttgcattaaataagaactttctgctgcatatgtgacagttacatccacaaaaaagttggaggtttgttcagggattggaaatgaaggtacttcagaattcctggaatgtttatgaatgctccagacttcagagtctttaatggaaaattcgagtcactaaaaatacattattcctatcatcagagctttcaagttcctctatacaaggtcaactgagttcctctttgcctcttgtttaattgtatttacttgtaccttaattataatctgtatattgttttagttaagttctaaaacaggttactattcatcatttgtgcagcatattgctggaatcaagaatctagtgcttcttcttcctgacttcactgtcaaaatagcagttcccatgctggaaataagcgcgctagcaatgtaattgatgacatggatgttgctgcttctgagttttgatcataaaaagctgttatgtgtttcttgaatgtaatgtagaagaggagaaaactgaaaactcttggcaaaaacgtgaaattgcagtgcctcggggtgggagggatcacccggattcagttcagacgatacttttttcaacccggtttgttccggttttcagcttcaggttttccttgtacttttgggggacacagacaaggctacttcatgtttgagaaacctaattgaggctatcttgtagcaaatgcacaccacactctttctctcttctctccttttttcaccttccatttgtaaaaatcctcctttaaaggttaataaaaaaaaagctccaagtctcgtagggtggatgtaggtcacattgaccgaaccacggtaaactctttgtgttctttcttctctctttgtttctcatttttacggcaagtgtttatggttaaccatgcatcttagaatagcttaaggcattaacataataacatcaatgttctccaaagattcaccttacttgttgtacataatcacaatgttaagcctatgaaggtagaatgctctcatgatttggtttaaccaaaaaataaactctaaaataatacggagtaataaaaattggccataaactaattacaaagtttgatttttgtatagggtatcttgtacttgtgataaaaaaaaattaaaaaaattaaaaaaataaataaattacttattccttctatttttacttgttacacttttctacaacagaaacatcaaaacgc

SEQ ID NO: 156 - DNA, 2304 bp, Spinacia oleracea
ggtgttgttagttaggcttgaataatatagacttttaaaaaattaggctaatttgatttaaaaaattgttacatatctaagaaaattgatgttaaatttatcagtcactgtataaacaataaaagtcaatatgtatgtaaaagggttgttagataaaatttttggctttttggtccacagtaagaggaactccaatgcttagttacaaggtggtgtagttaaatttgctacaaggttgtgtagttaaagagtaactccaatatattatagttaaatttaccacattaaatttctagctacaatatatttaagctataaagtttctcattgattgactataatacgttatagcaccttataatattttatttaatatacaattttatgtattttaccttttttacatttttttcgtgatctacctgctcatatgagccacactaatttggtagctgcttatacaattcttgtatcaacggttggttacttgttcaaatatttttatttttttacgagtaagtcattttatgatcattgaagttgctctaatattatcatggacctattaacgcatgaataattaactcggtaggaattagtttcaaaataaaattcccctcacaaaaaaaaaaaaaaaaaaaaaaatcagaaaaccaaccttctccagtttactgttgtctaaagccaaagagcatggaattttccagtaatcgcagaccccaaattctcttctccaatcgtccctgtcaatttcagcaattgaatcaatcgttgattttaggatttgccgccaaaaaaatgaaaaatccatgaattttagggttcaaatttgatccgtaattgggaaaattttcagcaattgatcttccaaatcattcatacttgtttccagactgcaaatgaaaggtgcgaactttatactgcattttgattttccattactgtaatttattaagatgaactgcattttgcaattgttttattcgactactcatctttaaatcaaattgctaaattgctagctaattttcttatcatattgccaaaaatttgttgcttaaatgattccatttctctaattatttttgttttattggtagataaataattaaggcaaatttgccaaaaaggaccttttataactcaaattttgcgagaaaggaccttatataattttttttgtgaaaacacaccttaaagttttttttttgcgagaaatgacctaaggaaagtttccggcattgactgagcttttccggccattaacttgcacgtgagcagcacgtgtggcttacgttggctaaagacactgattttcccgactcttgaattttcaaacttgattttatttcgattttttttttcaactttagttttaaagcttagaattttggaggaaaattgggtgtgattagcaaaataaagccacacgtgcttctcacgtgtaagtcaatagccaaaaaagctcagtcaatgccggaaatttacttttggttgtctttcgcaaaaagaaattatattaatgtgtgatttgacaaaaaaaaattatataaggtcctttctcgcaaaattttttacattaaggtgttttttgacaaaaaaagttatataaggtcctttctcgcaaaatttggattataaaaggtcctttttaacaaatttgccaataattaaatatcagccccattaattgaatattcaaaggaaatgtatggtccaaaaatggcgtttaatagtcaatgccgtgttttatggggtggtggagtactatatgactgtgtgtggacttggagaagactagagagtattgattatcaaaatatggaccctgaaaatgaaaatgaaaatgatgtttacacgtgctatttgcacggacttcaatgcaaatagtataaatttacggtcaaagttttcattctaaagcgtaaataactttcatgaatggaggacggtagtataagtataacgttatagcctaccattttcttatcatattcacataaatttgttgctgaaatttgttttacttggctaaaatacttttgttcttattggcagataaacatcagtacgtccattattggccaacttgctgagtccattattggccaacttgaacatatacctccaaacaataatcaataatgtcgattatgaagtttgtgaatgcaatttattatcactttcatttataaaatgactacttgattaacacatacaatattacctttctccaaacaccctttcaattctgcttaatcttgttttctcatcatctcttcatctttctgaaaacacaaccca

SEQ ID NO: 157 - DNA, 3453 bp, Spinacia oleracea
atggccgaaatcggatactcggtttgtgcgaaactcatcgaagtgattggcagtgagctgatcaaagagatttgtgacacatggggttacaaatctcttcttgaggacctcaacaaaactgtattgacggtcaggaacgttctcattcaagccggggtgatgcgggagcttactagtgaacaacaaggtttcattgcagaccttaaagatgttgtttatgatgctgatgacttgttcgacaagttactcactcgtgctgagcgaaaacagattgatggaaacgaaatctctgaaaaggtacgtcgtttcttttcctctagtaacaagatcggtcaagcttactacatgtctcgtaaggttaaggaaattaagaagcagttggatgaaattgttgataggcatacaaaatttgggtttagtgctgagtttatacctgtttgtaggggaaggggaaacgagagggaaacacgttcatatatagatgtcaagaatattcttgggagggataaagataagaatgatatcatagataggttgcttaatcgtaatggtaatgaagcttgtagtttcctgaccatagtgggagcgggaggattgggaaaaactgctcttgcacaacttgtgttcaatgatgaaagggtcaaaattgagttccatgatttgaggtattgggtttgtgtctctgatcaagatgggggccaatttgatgtgaaagaaatcctttgtaagattttagaggtggttactaaggagaaagttgataatagttccacattggaattggtacaaagccaatttcaagagaagttaagaggaaagaagtacttccttgttcttgatgatgtatggaacgaggatcgtgagaagtggcttcctttggaagagttgttaatgttgggtcaagggggaagcaaggttgtagtgaccacacgttcagagaagacagcaaatgtcatagggaaaagacatttttatacactggaatgtttgtcaccagattattcatggagcttatttgaaatgtcggcttttcagaaagggcatgagcaggaaaaccatcacgaactagttgatattgggaaaaagattgttgaaaaatgttataacaatccacttgctataacggtggtaggaagtcttctttatggagaggagataagtaagtggcggtcatttgaaatgagtgagttggccaaaattggcaatggggataataagattttgccgatattaaagctcagttaccataatcttataccctcgttgaagagttgcttcagttattgtgcagtgtttcccaaggatcatgaaataaagaaggagatgttgatttatctttggatggcacaaggatatgttgtgccgttggatggaggtcaaagtatagaagatgctgccgaggaacattttgtaattttgttacgaaggtgtttctttcaagatgtaaagaaggataaatatggtgatgttgattctgttaaaatccacgacttgatgcacgatgtcgcccaagaagtggggagggaggaattatgtgtagtgaatgataatacaaagaacttgggtgataaaatccgtcatgtacatcgtgatgtcattagatatgcacaaagagtctctctgtgtagccatagccataagattcgttcgtatattggtggtaattgtgaaaaacgttgtgtggatacactaatagacaagtggatgtgtcttaggatgttggacttgtcatggtcggatgttaaaaatttgcctaattcaataggtaaattgttgcacttgaggtatcttaacctgtcagataatagaaatctaaagatacttcctgatgcaattacaagactgcataatttgcagacactgcttttaaaagattgcagaagtttaaaggagttgccaaaagatttttgcaaattggtcaaactgagacacttggatttaaggggttgtcagtgtttgattggtatgccattgggaatggataggctaattagtcttagagtactaccaaaagttgtggtgggtaagaaggaacaaagtgatgatcagctgaaagccctaaaaggcctcaccgagataaaaggctccattgatatcacaatctattcaaagtatagaatagttgaaggcatgaatgacacaggaggagctgggtatttgaagagcatgaaacatctcacgggggttgatattacatttttgggtgaatgtgttaaccctgaagctgtgttggcaaccctagagccaccttcaaatatcaagagcttatctatacatcgttttgatggtaaaacacttccagtatggggaagagcagagattaattgggcaatctccctctcacatcttgtcgacatcaagcttagttgttgtcgtaatttgcaggagatgccagtgctgagtaaactgcctcatttgaaatcactggaacttcgatgtttggaaaacttagagtacatggagagtagaagcagcagcagtagcagtgacaaagaagcagcaacaccagaattaccaacattcttcccttcccttgaaaaacttacactttggtatctggaaaagttgaagggtttggggaacaggagatcgagtagttttccccgcctctctaaattggaaatccgggaatgcccagatctaacgtggtttcctccttgtccaagccttgaaacgttgaaattggaaaaaaacaatgaagcgttgcaaaaaataacaacaacaagaggtaaagaagaaaaagaagaagacaagaatgctggtgttggaaattcacaagatgatgacaatgtcaaattacggaaggtgaaaatagacaatctgggttatctcaaatcactgcccacaaattgtcttactcacctcgaccttacaataagagattccaaggagggggagggtgaatgggaagttggggatgcatttcagaagtgtgtatcttctttgagaagcctcaccataatcggaaatcacggaataaataaagtgaagagactgtctggaagaacagggttggagcatttcactctgttggactcactcaaattttcaaagatagaagaccaggaagatgagggcgaagacaacatcatgttctggaaaacctttcctcaaaacctccgcagtttgagaattaaagactctgacaaaatgacaagtttgcccatggggatgcagtacttaacctccctccaaaccctctatctacaccattgttatgaattgaattcccttccagaatggataagcagcttatcatctcttcaatccctgtacatatacaaatgtccagccctaaaatcactaccagaagcaatgcggaacctcacctcccttcagagccttgtgatacggcggtgtccagacctaattgaaagatgcgaagaacccaacggcgaggactatcccaaaattcgacacatctccagaattgtactaaatgaatattggtga

SEQ ID NO: 158 - DNA, 3486 bp, Spinacia oleracea
atggccgaaatcggatactcggtttgtgcgaaactcatcgaagtgattggcagtgagctgatcaaagagatttgtgacacatggggttacaaatctcttcttgaggacctcaacaaaactgtattgacggtcaggaacgttctcattcaagccggggtgatgcgggagcttactagtgaacaacaaggtttcattgcagaccttaaagatgttgtttatgatgctgatgacttgttcgacaagttactcactcgtgctgagcgaaaacagattgatggaaacgaaatctctgaaaaggtacgtcgtttcttttcctctagtaacaagatcggtcaagcttactacatgtctcgtaaggttaaggaaattaagaagcagttggatgaaattgttgataggcatacaaaatttgggtttagtgctgagtttatacctgtttgtaggggaaggggaaacgagagggaaacacgttcatatatagatgtcaagaatattcttgggagggataaagataagaatgatatcatagataggttgcttaatcgtaatggtaatgaagcttgtagtttcctgaccatagtgggagcgggaggattgggaaaaactgctcttgcacaacttgtgttcaatgatgaaagggtcaaaattgagttccatgatttgaggtattgggtttgtgtctctgatcaagatgggggccaatttgatgtgaaagaaatcctttgtaagattttagaggtggttactaaggagaaagttgataatagttccacattggaattggtacaaagccaatttcaagagaagttaagaggaaagaagtacttccttgttcttgatgatgtatggaacgaggatcgtgagaagtggcttcctttggaagagttgttaatgttgggtcaagggggaagcaaggttgtagtgaccacacgttcagagaagacagcaaatgtcatagggaaaagacatttttatacactggaatgtttgtcaccagattattcatggagcttatttgaaatgtcggcttttcagaaagggcatgagcaggaaaaccatcacgaactagttgatattgggaaaaagattgttgaaaaatgttataacaatccacttgctataacggtggtaggaagtcttctttatggagaggagataagtaagtggcggtcatttgaaatgagtgagttggccaaaattggcaatggggataataagattttgccgatattaaagctcagttaccataatcttataccctcgttgaagagttgcttcagttattgtgcagtgtttcccaaggatcatgaaataaagaaggagatgttgatttatctttggatggcacaaggatatgttgtgccgttggatggaggtcaaagtatagaagatgctgccgaggaacattttgtaattttgttacgaaggtgtttctttcaagatgtaaagaaggataaatatggtgatgttgattctgttaaaatccacgacttgatgcacgatgtcgcccaagaagtggggagggaggaattatgtgtagtgaatgataatacaaagaacttgggtgataaaatccgtcatgtacatcgtgatgtcattagatatgcacaaagagtctctctgtgtagccatagccataagattcgttcgtatattggtggtaattgtgaaaaacgttgtgtggatacactaatagacaagtggatgtgtcttaggatgttggacttgtcatggtcggatgttaaaaatttgcctaattcaataggtaaattgttgcacttgaggtatcttaacctgtcagataatagaaatctaaagatacttcctgatgcaattacaagactgcataatttgcagacactgcttttaaaagattgcagaagtttaaaggagttgccaaaagatttttgcaaattggtcaaactgagacacttggatttaaggggttgtcagtgtttgattggtatgccattgggaatggataggctaattagtcttagagtactaccaaaagttgtggtgggtaagaaggaacaaagtgatgatcagctgaaagccctaaaaggcctcaccgagataaaaggctccattgatatcacaatctattcaaagtatagaatagttgaaggcatgaatgacacaggaggagctgggtatttgaagagcatgaaacatctcacgggggttgatattacatttttgggtgaatgtgttaaccctgaagctgtgttggcaaccctagagccaccttcaaatatcaagagcttatctatacatcgttttgatggtaaaacacttccagtatggggaagagcagagattaattgggcaatctccctctcacatcttgtcgacatcaagcttagttgttgtcgtaatttgcaggagatgccagtgctgagtaaactgcctcatttgaaatcactggaacttcgatgtttggaaaacttagagtacatggagagtagaagcagcagcagtagcagtgacaaagaagcagcaacaccagaattaccaacattcttcccttcccttgaaaaacttacactttggtatctggaaaagttgaagggtttggggaacaggagatcgagtagttttccccgcctctctaaattggaaatccgggaatgcccagatctaacgtggtttcctccttgtccaagccttgaaacgttgaaattggaaaaaaacaatgaagcgttgcaaaaaataacaacaacaagaggtaaagaagaaaaagaagaagacaagaatgctggtgttggaaattcacaagatgatgacaatgtcaaattacggaaggtgaaaatagacaatctgggttatctcaaatcactgcccacaaattgtcttactcacctcgaccttacaataagagattccaaggagggggagggtgaatgggaagttggggatgcatttcagaagtgtgtatcttctttgagaagcctcaccataatcggaaatcacggaataaataaagtgaagagactgtctggaagaacagggttggagcatttcactctgttggactcactcaaattttcaaagatagaagaccaggaagatgagggcgaagacaacatcatgttctggaaaacctttcctcaaaacctccgcagtttgagaattaaagactctgacaaaatgacaagtttgcccatggggatgcagtacttaacctccctccaaaccctctatctacaccattgttatgaattgaattcccttccagaatggataagcagcttatcatctcttcaatccctgtacatatacaaatgtccagccctaaaatcactaccagaagcaatgcggaacctcacctcccttcagagccttgtgatacggcggtgtccagacctaattgaaagatgcgaagaacccaacggcgaggactatcccaaaattcgacacatctccagaattttactcaacactagcttgatcctgaacgcacccaaccttcaggacatggattga

SEQ ID NO: 159 - protein, 1150 aa, Spinacia oleracea
MAEIGYSVCAKLIEVIGSELIKEICDTWGYKSLLEDLNKTVLTVRNVLIQAGVMRELTSEQQGFIADLKDVVYDADDLFDKLLTRAERKQIDGNEISEKVRRFFSSSNKIGQAYYMSRKVKEIKKQLDEIVDRHTKFGFSAEFIPVCRGRGNERETRSYIDVKNILGRDKDKNDIIDRLLNRNGNEACSFLTIVGAGGLGKTALAQLVFNDERVKIEFHDLRYWVCVSDQDGGQFDVKEILCKILEVVTKEKVDNSSTLELVQSQFQEKLRGKKYFLVLDDVWNEDREKWLPLEELLMLGQGGSKVVVTTRSEKTANVIGKRHFYTLECLSPDYSWSLFEMSAFQKGHEQENHHELVDIGKKIVEKCYNNPLAITVVGSLLYGEEISKWRSFEMSELAKIGNGDNKILPILKLSYHNLIPSLKSCFSYCAVFPKDHEIKKEMLIYLWMAQGYVVPLDGGQSIEDAAEEHFVILLRRCFFQDVKKDKYGDVDSVKIHDLMHDVAQEVGREELCVVNDNTKNLGDKIRHVHRDVIRYAQRVSLCSHSHKIRSYIGGNCEKRCVDTLIDKWMCLRMLDLSWSDVKNLPNSIGKLLHLRYLNLSDNRNLKILPDAITRLHNLQTLLLKDCRSLKELPKDFCKLVKLRHLDLRGCQCLIGMPLGMDRLISLRVLPKVVVGKKEQSDDQLKALKGLTEIKGSIDITIYSKYRIVEGMNDTGGAGYLKSMKHLTGVDITFLGECVNPEAVLATLEPPSNIKSLSIHRFDGKTLPVWGRAEINWAISLSHLVDIKLSCCRNLQEMPVLSKLPHLKSLELRCLENLEYMESRSSSSSSDKEAATPELPTFFPSLEKLTLWYLEKLKGLGNRRSSSFPRLSKLEIRECPDLTWFPPCPSLETLKLEKNNEALQKITTTRGKEEKEEDKNAGVGNSQDDDNVKLRKVKIDNLGYLKSLPTNCLTHLDLTIRDSKEGEGEWEVGDAFQKCVSSLRSLTIIGNHGINKVKRLSGRTGLEHFTLLDSLKFSKIEDQEDEGEDNIMFWKTFPQNLRSLRIKDSDKMTSLPMGMQYLTSLQTLYLHHCYELNSLPEWISSLSSLQSLYIYKCPALKSLPEAMRNLTSLQSLVIRRCPDLIERCEEPNGEDYPKIRHISRIVLNEYW

SEQ ID NO: 160 - protein, 1161 aa, Spinacia oleracea
MAEIGYSVCAKLIEVIGSELIKEICDTWGYKSLLEDLNKTVLTVRNVLIQAGVMRELTSEQQGFIADLKDVVYDADDLFDKLLTRAERKQIDGNEISEKVRRFFSSSNKIGQAYYMSRKVKEIKKQLDEIVDRHTKFGFSAEFIPVCRGRGNERETRSYIDVKNILGRDKDKNDIIDRLLNRNGNEACSFLTIVGAGGLGKTALAQLVFNDERVKIEFHDLRYWVCVSDQDGGQFDVKEILCKILEVVTKEKVDNSSTLELVQSQFQEKLRGKKYFLVLDDVWNEDREKWLPLEELLMLGQGGSKVVVTTRSEKTANVIGKRHFYTLECLSPDYSWSLFEMSAFQKGHEQENHHELVDIGKKIVEKCYNNPLAITVVGSLLYGEEISKWRSFEMSELAKIGNGDNKILPILKLSYHNLIPSLKSCFSYCAVFPKDHEIKKEMLIYLWMAQGYVVPLDGGQSIEDAAEEHFVILLRRCFFQDVKKDKYGDVDSVKIHDLMHDVAQEVGREELCVVNDNTKNLGDKIRHVHRDVIRYAQRVSLCSHSHKIRSYIGGNCEKRCVDTLIDKWMCLRMLDLSWSDVKNLPNSIGKLLHLRYLNLSDNRNLKILPDAITRLHNLQTLLLKDCRSLKELPKDFCKLVKLRHLDLRGCQCLIGMPLGMDRLISLRVLPKVVVGKKEQSDDQLKALKGLTEIKGSIDITIYSKYRIVEGMNDTGGAGYLKSMKHLTGVDITFLGECVNPEAVLATLEPPSNIKSLSIHRFDGKTLPVWGRAEINWAISLSHLVDIKLSCCRNLQEMPVLSKLPHLKSLELRCLENLEYMESRSSSSSSDKEAATPELPTFFPSLEKLTLWYLEKLKGLGNRRSSSFPRLSKLEIRECPDLTWFPPCPSLETLKLEKNNEALQKITTTRGKEEKEEDKNAGVGNSQDDDNVKLRKVKIDNLGYLKSLPTNCLTHLDLTIRDSKEGEGEWEVGDAFQKCVSSLRSLTIIGNHGINKVKRLSGRTGLEHFTLLDSLKFSKIEDQEDEGEDNIMFWKTFPQNLRSLRIKDSDKMTSLPMGMQYLTSLQTLYLHHCYELNSLPEWISSLSSLQSLYIYKCPALKSLPEAMRNLTSLQSLVIRRCPDLIERCEEPNGEDYPKIRHISRILLNTSLILNAPNLQDMD

SEQ ID NO: 161 - DNA, 1385 bp, Spinacia oleracea
acaagtggatgtgtcttaggatgttggacttgtcatggtcggatgttaaaaatttgcctaattcaataggtaaattgttgcacttgaggtatcttaacctgtcagataatagaaatctaaagatacttcctgatgcaattacaagactgcataatttgcagacactgcttttaaaagattgcagaagtttaaaggagttgccaaaagatttttgcaaattggtcaaactgagacacttggatttaaggggttgtcagtgtttgattggtatgccattgggaatggataggctaattagtcttagagtactaccaaaagttgtggtgggtaagaaggaacaaagtgatgatcagctgaaagccctaaaaggcctcaccgagataaaaggctccattgatatcacaatctattcaaagtatagaatagttgaaggcatgaatgacacaggaggagctgggtatttgaagagcatgaaacatctcacgggggttgatattacatttttgggtgaatgtgttaaccctgaagctgtgttggcaaccctagagccaccttcaaatatcaagagcttatctatacatcgttttgatggtaaaacacttccagtatggggaagagcagagattaattgggcaatctccctctcacatcttgtcgacatcaagcttagttgttgtcgtaatttgcaggagatgccagtgctgagtaaactgcctcatttgaaatcactggaacttcgatgtttggaaaacttagagtacatggagagtagaagcagcagcagtagcagtgacaaagaagcagcaacaccagaattaccaacattcttcccttcccttgaaaaacttacactttggtatctggaaaagttgaagggtttggggaacaggagatcgagtagttttccccgcctctctaaattggaaatccgggaatgcccagatctaacgtggtttcctccttgtccaagccttgaaacgttgaaattggaaaaaaacaatgaagcgttgcaaaaaataacaacaacaagaggtaaagaagaaaaagaagaagacaagaatgctggtgttggaaattcacaagatgatgacaatgtcaaattacggaaggtgaaaatagacaatctgggttatctcaaatcactgcccacaaattgtcttactcacctcgaccttacaataagagattccaaggagggggagggtgaatgggaagttggggatgcatttcagaagtgtgtatcttctttgagaagcctcaccataatcggaaatcacggaataaataaagtgaagagactgtctggaagaacagggttggagcatttcactctgttggactcactcaaattttcaaagatagaagaccaggaagatgagggcgaa

SEQ ID NO: 162 - protein, 461 aa, Spinacia oleracea
KWMCLRMLDLSWSDVKNLPNSIGKLLHLRYLNLSDNRNLKILPDAITRLHNLQTLLLKDCRSLKELPKDFCKLVKLRHLDLRGCQCLIGMPLGMDRLISLRVLPKVVVGKKEQSDDQLKALKGLTEIKGSIDITIYSKYRIVEGMNDTGGAGYLKSMKHLTGVDITFLGECVNPEAVLATLEPPSNIKSLSIHRFDGKTLPVWGRAEINWAISLSHLVDIKLSCCRNLQEMPVLSKLPHLKSLELRCLENLEYMESRSSSSSSDKEAATPELPTFFPSLEKLTLWYLEKLKGLGNRRSSSFPRLSKLEIRECPDLTWFPPCPSLETLKLEKNNEALQKITTTRGKEEKEEDKNAGVGNSQDDDNVKLRKVKIDNLGYLKSLPTNCLTHLDLTIRDSKEGEGEWEVGDAFQKCVSSLRSLTIIGNHGINKVKRLSGRTGLEHFTLLDSLKFSKIEDQEDEGE

SEQ ID NO: 163 - DNA, 1385 bp, Spinacia oleracea
acaagtggatgtgtcttaggatgttggacttgtcatggtcggatgttaaaaatttgcctaattcaataggtaaattgttgcacttgaggtatcttaacctgtcagataatagaaatctaaagatacttcctgatgcaattacaagactgcataatttgcagacactgcttttaaaagattgcagaagtttaaaggagttgccaaaagatttttgcaaattggtcaaactgagacacttggatttaaggggttgtcagtgtttgattggtatgccattgggaatggataggctaattagtcttagagtactaccaaaagttgtggtgggtaagaaggaacaaagtgatgatcagctgaaagccctaaaaggcctcaccgagataaaaggctccattgatatcacaatctattcaaagtatagaatagttgaaggcatgaatgacacaggaggagctgggtatttgaagagcatgaaacatctcacgggggttgatattacatttttgggtgaatgtgttggccctgaagctgtattggaaaccctagagccaccttcaaatatcaagagcttatctatacatcgttttgatggtaaaacacttccagtatggggaagagcagagattaattgggcaatctccctctcacatcttgtcgacatcaagcttagttgttgtcgtaatttgcaggagatgccagtgctgagtaaactgcctcatttgaaatcactggaacttcgatgtttggaaaacttagagtacatggagagtagaagcagcagcagtagcagtgacaaagaagcagcaacaccagaattaccaacattcttcccttcccttgaaaaacttacactttggtatctggaaaagttgaagggtttggggaacaggagatcgagtagttttccccgcctctctaaattggaaatccgggaatgcccagatctaacgtggtttcctccttgtccaagccttgaaacgttgaaattggaaaaaaacaatgaagcgttgcaaaaaataacaacaacaagaggtaaagaagaaaaagaagaagacaagaatgctggtgttggaaattcacaagatgatgacaatgtcaaattacggaaggtgaaaatagacaatctgggttatctcaaatcactgcccacaaattgtcttactcacctcgaccttacaataagagattccaaggagggggagggtgaatgggaagttggggatgcatttcagaagtgtgtatcttctttgagaagcctcaccataatcggaaatcacggaataaataaagtgaagagactgtctggaagaacagggttggagcatttcactctgttggactcactcaaattttcaaagatagaagaccaggaagatgagggcgaa

SEQ ID NO: 164 - protein, 461 aa, Spinacia oleracea
KWMCLRMLDLSWSDVKNLPNSIGKLLHLRYLNLSDNRNLKILPDAITRLHNLQTLLLKDCRSLKELPKDFCKLVKLRHLDLRGCQCLIGMPLGMDRLISLRVLPKVVVGKKEQSDDQLKALKGLTEIKGSIDITIYSKYRIVEGMNDTGGAGYLKSMKHLTGVDITFLGECVGPEAVLETLEPPSNIKSLSIHRFDGKTLPVWGRAEINWAISLSHLVDIKLSCCRNLQEMPVLSKLPHLKSLELRCLENLEYMESRSSSSSSDKEAATPELPTFFPSLEKLTLWYLEKLKGLGNRRSSSFPRLSKLEIRECPDLTWFPPCPSLETLKLEKNNEALQKITTTRGKEEKEEDKNAGVGNSQDDDNVKLRKVKIDNLGYLKSLPTNCLTHLDLTIRDSKEGEGEWEVGDAFQKCVSSLRSLTIIGNHGINKVKRLSGRTGLEHFTLLDSLKFSKIEDQEDEGE

SEQ ID NO: 165 - DNA, 1424 bp, Spinacia oleracea
acaagtggatgtgtcttaggatgttggacttgtcaaggtcggatgttaaaaatttgcctaattcaataggtaaattgttgcacttgaggtatcttaacctgtcagataatagaaatctaaagatacttcctgatgcaattacaagactgcataatttgcagacactacttttagaacgttgcgaaagtttaaaggagttgccaaaagatttttgcaaattggtcaaactgagacacttggatttaaggggatgtttttctttgattggtatgccattgggaatggataggctaattagtcttagaatactaccaaacattgtggtgggtaggaaggaacaaagtgatgatgatgagctgaaagccctaaaaggcctcaccgagataaaaggctccattcgtattagaatctattcaaagtatagaatagttgaaggcatgaatgacacaggaggagctgggtatttgaagagcatgaaacatctcagggagattggtattacatttgatggtggatgtgttaaccctgaagctgtgttggcaaccctagagccaccttcaaatatcaagaggttagagatgtggcattacagtggtacaacaattccagtatggggaagagcagagattaattgggcaatctccctctcacatcttgtcgacatccagctttggcattgtcgtaatttgcaggagatgccagtgctgagtaaactgcctcatttgaaatcactggaactttataatttgattagtttagagtacatggagagcacaagcagaagcagtagcagtgacacagaagcagcaacaccagaattaccaacattcttcccttcccttgaaaaacttacactttggcgtctggacaagttgaagggttttgggaacaggagatcgagtagttttccccgcctctctaaattggaaatctgggaatgcccagatctaacgtggtttcctccttgtccaagccttaaaacgttgaaattggaaaaaaacaatgaagcgttgcaaataatagtaaaaataacaacaacaagaggtaaagaagaaaaagaagaagacaagaatgctggtgttggaaattcacaagatgatgacaatgtcaaattacggaaggtggaaatagacaatgtgagttatctcaaatcactgcccacaaattgtcttactcacctcaaaataactggaatagattacagggagggggagattgaatcagattccgtggaggaggagattgaattggaagttggggaggcatttcagaagtgtgcatcttctttgagaagcctcatcataatcggaaatcacggaataaataaagtgatgagactgtctggaagaacagggttggagcatttcactctgttggactcactcgaactttcaaagatagaagaccaggaagatgagggcgaa

SEQ ID NO: 166 - protein, 474 aa, Spinacia oleracea
KWMCLRMLDLSRSDVKNLPNSIGKLLHLRYLNLSDNRNLKILPDAITRLHNLQTLLLERCESLKELPKDFCKLVKLRHLDLRGCFSLIGMPLGMDRLISLRILPNIVVGRKEQSDDDELKALKGLTEIKGSIRIRIYSKYRIVEGMNDTGGAGYLKSMKHLREIGITFDGGCVNPEAVLATLEPPSNIKRLEMWHYSGTTIPVWGRAEINWAISLSHLVDIQLWHCRNLQEMPVLSKLPHLKSLELYNLISLEYMESTSRSSSSDTEAATPELPTFFPSLEKLTLWRLDKLKGFGNRRSSSFPRLSKLEIWECPDLTWFPPCPSLKTLKLEKNNEALQIIVKITTTRGKEEKEEDKNAGVGNSQDDDNVKLRKVEIDNVSYLKSLPTNCLTHLKITGIDYREGEIESDSVEEEIELEVGEAFQKCASSLRSLIIIGNHGINKVMRLSGRTGLEHFTLLDSLELSKIEDQEDEGE

SEQ ID NO: 167 - DNA, 1481 bp, Spinacia oleracea
acaagtggatgtgtcttaggatgttggacttgtcatggtcggatgttaaaaatttgcctaattcaataggtaaattgttgcacttgaggtatcttaacctgtcagataatagaaatctaaagatacttcctgatgcaattacaagactgcataatttgcagacactgcttttaaaagattgcagaagtttaaaggagttgccaaaagatttttgcaaattggtcaaactgagacacttggatttaaggggttgtcagtgtttgattggtatgccattgggaatggataggctaattagtcttagagtactaccaaaagttgtggtgggtaagaaggaacaaagtgatgatcagctgaaagccctaaaaggcctcaccgagataaaaggctccattgatatcacaatctattcaaagtatagaatagttgaaggcatgaatgacacaggaggaggagctgggtatttgaagagcatgaaacatctcacgggggttaatattacatttgatgaaggtggatgtgttaaccctgaagctgtgtatttgaagagcatgaaacatctcacgagggttattattatatttgattataaaggtggatgtgttaaccctgaagctgtgttggcaaccctagagccaccttcaaatatcaagaggttagaggtgtggcattacgatggtacaacaattccagtatggggaagagcagagattaattgggcaatctccctctcacatcttgtcgacatcaagcttagttgttgtcgtaatttgcaggagatgccagtgctgagtaaactgcctcatttgaaatcactggaacttcgatgtttggaaaacttagagtacatggagagtacaagcagaagcagtagcagtgacacagaagcagcaacaccagaattaccaacattcttcccttcccttgaaaaacttacactttggcgtctggacaagttgaagggttttgggaacaggagatcgagtagttttccccgcctctctgaattggaaatctggaaatgcccagatctaacgtggtttccttcttgtccaagccttgaagagttggaattgaaagaaaacaatgaagcgttgcaaataatagtaaaaataacaacaacaagaggtaaagaagaaaaagaagaagacaagaatgctggtgttggaaattcacaagatgatgacaatgtcaaattatggaaggtggaaatagacaatctgggttatctcaaatcactgcccacaaattgtctgactcacctcgaccttacaataagagattccaaggagggggagattgaattggaagttggggaggcatttcagaagtgtgtatcttctttgagaagcctcaccataatcggaaatcacggaataaataaagtgaagagactgtctggaagaacagggttggagcatttcactctgttggaatcactcaaattttcaaagatagaagaccaggaagatgagggcgaa

SEQ ID NO: 168 - protein, 493 aa, Spinacia oleracea
KWMCLRMLDLSWSDVKNLPNSIGKLLHLRYLNLSDNRNLKILPDAITRLHNLQTLLLKDCRSLKELPKDFCKLVKLRHLDLRGCQCLIGMPLGMDRLISLRVLPKVVVGKKEQSDDQLKALKGLTEIKGSIDITIYSKYRIVEGMNDTGGGAGYLKSMKHLTGVNITFDEGGCVNPEAVYLKSMKHLTRVIIIFDYKGGCVNPEAVLATLEPPSNIKRLEVWHYDGTTIPVWGRAEINWAISLSHLVDIKLSCCRNLQEMPVLSKLPHLKSLELRCLENLEYMESTSRSSSSDTEAATPELPTFFPSLEKLTLWRLDKLKGFGNRRSSSFPRLSELEIWKCPDLTWFPSCPSLEELELKENNEALQIIVKITTTRGKEEKEEDKNAGVGNSQDDDNVKLWKVEIDNLGYLKSLPTNCLTHLDLTIRDSKEGEIELEVGEAFQKCVSSLRSLTIIGNHGINKVKRLSGRTGLEHFTLLESLKFSKIEDQEDEGE

SEQ ID NO: 169 - DNA, 2180 bp, Spinacia oleracea
acaagtggatgtgtcttaggatgttggacttgtcatggtcggatgttaaaaatttgcctaattcaataggtaaattgttgcacttgaggtatcttaacctgtcagataatagaaatctaaagatacttcctgatgcaattacaagactgcataatttgcagacactgcttttagaagattgcagaagtttaaaggagttgccaaaagatttttgcaaattggtcaaactgaggcacttggaattacagggttgtcatgatttgattggtatgccatttggaatggataagctaactagtcttagaatactaccaaacattgtggtgggtaggaaggaacaaagtgatgatgagctgaaagccctaaaaggcctcaccgagataaaaggctccatttctatcagaatctattcaaagtatagaatagttgaaggcatgaatgacacaggaggagctgcttatttgaagagcatgaaacatctcagggagattgatattacatttttgggtgaatgtgttggccctgaagctgtattggaaaccttagagccaccttcaaatatcaagagcttatatatatataattacagtggtacaacaattccagtatggggaagagcagagattaattgggcaatctccctctcacatctcgtcgacatccagcttagttgttgtagtaatttgcaggagatgccagtgctgagtaaactgcctcatttgaaatcgctgaaacttggatggttggataacttagagtacatggagagtagcagtagcagtgacacagaagcagcaacaccagaattaccaacattcttcccttcccttgaaaaacttactttacagcatctggaaaagttgaagggttttgggaacaggagatcgagtagttttccccgcctctctgaattggaaatcaagaaatgcccagatctaacgtcatttccttcttgtccaagccttgagaagttggaattgaaagaaagcaatgaagcattgcaaataatagtaaaaataacaacaagaggtaaagaaaaagaagagaacaataatgctggtgttagaaattcacaagatgatgacaaagtcaaattacggaagatggtgatagacaatctgggttatctcacgggggttgatattagatttgatgatagagaaggtggatttgttaaccctgaagctgtgttggcaaccctagagccaccttcaaatatcaagagcttatctatacatcgttttgatggtaaaacacttccagtatggggaagagcagagattaattgggcaatctccctctcacatcttgtcgacatccagctttggcattgtcgtaatttgcaggagatgccagtgctgagtaaactgcctcatttgaaatcactggaactttataatttgattagtttagagtacatggagagcacaagcagaagcagtagcagtgacacagaagcagcaacaccagaattaccaacattcttcccttcccttgaaaaacttacactttggggtctggaaaagttgaagggtttggggaacaggagatcgagtagttttccccgcctctctgaattgaaaatcatggaatgcccagatctaacgtggtttcctccctgtccaagccttgaaaaacttacactttggcgtctggacaagttgaagggttttgggaaccggagatcgagtacttttccccgcctctctgaattggaaatcaagaaatgcccagatctaacgtcatttccttcttgtccaagccttgagaagttggaattgaaagaaagcaatgaagcattgcaaataatagtaaaaataacaacaagaggtaaagaaaaagaagagaacaataatgctggtgttagaaattcacaagatgatgacaaagtcaaattacggaagatggtgatagacaatctgggttatctcaaatcactgcccacaaattgtcttactcacctcgaccttacaataagtgattccaaggagggggagggtgaatgggaagttggggatgcatttcagaagtgtgtatcttctttgagaagcctcaccataatcggaaatcacggaataaataaagtgaagagactgtctggaagaacagggttggagcatttcactctgttggaatcactcaaactttcagatatagaagaccaggaagatgagggcgaa

SEQ ID NO: 170 - protein, 726 aa, Spinacia oleracea; identical to SEQ ID NO: 111

1. A method for modifying the resistance profile of a spinach plant to Peronospora farinosa f. sp. spinaciae, comprising introducing a WOLF allele or a resistance-conferring part thereof into the genome of said spinach plant, or modifying an endogenous WOLF allele in the genome of said spinach plant, wherein the WOLF allele encodes a CC-NBS-LRR protein that comprises in its amino acid sequence:
a) the motif “MAEIGYSVC” (SEQ ID NO: 171) at its N-terminus, and
b) the motif “KWMCLR” (SEQ ID NO: 172) or “HVGCVVDR” (SEQ ID NO: 173).

2. The method as claimed in claim 1, wherein the WOLF allele encodes a WOLF protein according to any one of SEQ ID NOs referred to in Table 3.

3. The method as claimed in claim 1, wherein introducing a WOLF allele into the genome of a spinach plant comprises the step of expressing in a spinach cell a recombinant nucleic acid construct comprising a coding sequence encoding one or more WOLF polypeptides.

4. The method as claimed in claim 3, wherein the nucleic acid construct is designed for stable incorporation into the genome of a plant cell.

5. The method as claimed in claim 1, wherein modifying the endogenous WOLF allele is achieved by means of genome editing techniques or mutagenesis techniques.

6. The method as claimed in claim 5, wherein the endogenous WOLF allele is replaced by a modified WOLF allele by means of genome editing techniques.

7. A spinach plant comprising a WOLF allele as defined in claim 1.

8. The spinach plant as claimed in claim 7, which is obtainable by the method of any one of the claims 1-6.

9. The spinach plant according to claim 7, having a modified resistance profile to Peronospora farinosa f. sp. spinaciae as compared to an isogenic spinach plant that has not been modified by the method of claim 1.

10. A spinach plant comprising one or more WOLF alleles, wherein said WOLF allele is selected from the nucleotide sequences referred to in Table 3 or is a nucleotide sequence encoding a polypeptide having an amino acid sequence referred to in Table 3 or is a nucleotide sequence encoding a polypeptide having a sequence similarity of 95%, 96%, 97%, 98%, or 99% with any one of the amino acid sequences referred to in Table 3, or a having a sequence similarity of 95%, 96%, 97%, 98%, or 99% with any one of the nucleotide sequences referred to in Table 3.

11. A propagation material of a plant as claimed in claim 7, wherein a plant grown or regenerated from the material comprises a resistance-conferring WOLF allele as defined in claim 1.

12. A cell of a spinach plant as claimed in claim 7, which cell comprises a WOLF allele as defined in claim 1.

13. A seed capable of growing into a spinach plant as claimed in claim 7.

14. Harvested leaves of a spinach plant as claimed in claim 7.

15. A food product comprising the harvested leaves of claim 14.

16. A WOLF allele having a nucleotide sequence selected from SEQ ID No:8, SEQ ID No:12, SEQ ID No:16, SEQ ID No:20, SEQ ID No:24, SEQ ID No:28, SEQ ID No:34, SEQ ID No:38, SEQ ID No:44, SEQ ID No:50, SEQ ID No:54, SEQ ID No:60, SEQ ID No:64, SEQ ID No:72, SEQ ID No:76, SEQ ID No:82, SEQ ID No:86, SEQ ID No:90, SEQ ID No:96, SEQ ID No:102, SEQ ID No:145, SEQ ID No:155.

17. A vector comprising a WOLF allele according to claim 16.

18. A spinach plant comprising the vector of claim 17.

19. A method for selecting a spinach plant comprising a novel WOLF allele that confers resistance to Peronospora farinosa f. sp. spinaciae in a spinach plant, comprising:
a) determining the sequence of the LRR domain or part thereof of a WOLF allele in the genome of a spinach plant;
b) comparing said sequence to the sequences referred to in Table 3;
c) if the sequence of the LRR domain or part thereof is substantially different from the sequences referred to in Table 3, select the spinach plant that harbours said sequence in its genome as a spinach plant that comprises a novel WOLF allele.

20. The method as claimed in claim 19, wherein the selected plants are subsequently tested for their resistance to different pathogenic races of Peronospora farinosa f. sp. spinaciae.

21. A method for identifying a WOLF allele that confers resistance to one or more pathogenic races of Peronospora farinosa f. sp. spinaciae in a spinach plant, comprising:
a) phenotypically selecting a spinach plant that is resistant to one or more pathogenic races of Peronospora farinosa f. sp. spinaciae;
b) determining the sequence of the LRR domain or part thereof of a WOLF allele that is present in the genome of said spinach plant, and
c) optionally comparing the sequence to a reference sequence representing the WOLF gene to be identified.

22. The method as claimed in claim 19, 20 or 21, wherein part of a WOLF allele is amplified from the plant's genome by means of PCR.

23. A primer pair for amplifying the LRR domain or part thereof of a WOLF allele from the genome of a spinach plant, wherein the forward primer is a nucleic acid molecule comprising the sequence of SEQ ID No:1 or SEQ ID No:3, and the reverse primer is a nucleic acid molecule comprising the sequence of SEQ ID No:2.

24. An allele of an alpha-WOLF gene, wherein the protein encoded by said allele is a CC-NBS-LRR protein that comprises in its amino acid sequence: a) (the motif “MAEIGYSVC” (SEQ ID NO: 171) at its N-terminus; and b) the motif “KWMCLR” (SEQ ID NO: 172); and wherein the LRR domain of the protein has in order of increased preference 50%, 55%, 60%, 65%, 70%, 75%, 80%, 82%, 85%, 87%, 90%, 91%, 92%, 93%, 94%, 95%, 96%, 97%, 98%, 99%, sequence similarity to any one of the amino acid sequences having SEQ ID No:111. SEQ ID No:113, SEQ ID No:117, SEQ ID No:118, SEQ ID No:119, SEQ ID No:121, SEQ ID No:123, SEQ ID No:125, SEQ ID No:127, SEQ ID No:129, SEQ ID No:131, SEQ ID No:133, SEQ ID No:135, SEQ ID No:139, SEQ ID No: 152, SEQ ID No:154, SEQ ID No:162, SEQ ID No:164, SEQ ID No:166, SEQ ID No:168, SEQ ID No:170; and wherein the allele when present in a spinach plant confers resistant to one or more Peronospora farinosa f sp. spinaciae races or isolates.

25. An allele of a beta-WOLF gene, wherein the protein encoded by said allele is a CC-NBS-LRR protein that comprises in its amino acid sequence: a) the motif “MAEIGYSVC” (SEQ ID NO: 171) at its N-terminus; and b) the motif “HVGCVVDR” (SEQ ID NO: 173); and wherein the LRR domain of the protein has in order of increased preference 50%, 55%, 60%, 65%, 70%, 75%, 80%, 82%, 85%, 87%, 90%, 91%, 92%, 93%, 94%, 95%, 96%, 97%, 98%, 99%, sequence similarity to any one of the amino acid sequences having SEQ ID No:109, SEQ ID No:115. SEQ ID No:137; and wherein the allele when present in a spinach plant confers resistant to one or more Peronospora farinosa f. sp. spinaciae races or isolates.

26. A spinach plant comprising a WOLF allele as defined in claim 1, wherein the LRR domain of the WOLF allele has an amino acid sequence selected from the group consisting of SEQ ID No:109, SEQ ID No:111. SEQ ID No:113, SEQ ID No:115, SEQ ID No:117, SEQ ID No:118, SEQ ID No:119, SEQ ID No:121, SEQ ID No:123, SEQ ID No:125, SEQ ID No:127, SEQ ID No:129, SEQ ID No:131, SEQ ID No:133, SEQ ID No:135, SEQ ID No:137, SEQ ID No:139, SEQ ID No: 152, SEQ ID No:154, SEQ ID No:162, SEQ ID No:164, SEQ ID No:166, SEQ ID No:168, and SEQ ID No:170.

27. A hybrid spinach plant comprising two WOLF alleles as defined in claim 1, wherein the LRR domain of the first WOLF allele and second WOLF allele each have an amino acid sequence selected from the group consisting of SEQ ID No:109, SEQ ID No:111. SEQ ID No:113, SEQ ID No:115, SEQ ID No:117, SEQ ID No:118, SEQ ID No:119, SEQ ID No:121, SEQ ID No:123, SEQ ID No:125, SEQ ID No:127, SEQ ID No:129, SEQ ID No:131, SEQ ID No:133, SEQ ID No:135, SEQ ID No:137, SEQ ID No:139, SEQ ID No: 152, SEQ ID No:154, SEQ ID No:162, SEQ ID No:164, SEQ ID No:166, SEQ ID No:168, and SEQ ID No:170.

28. A hybrid spinach plant as claimed in claim 27, wherein the first and second allele are selected such that the combination of the two alleles provides resistance to races Pfs1, Pfs2, Pfs3, Pfs4, Pfs5, Pfs6, Pfs7, Pfs8, Pfs9, Pfs10, Pfs11, Pfs12, Pfs13, Pfs14, Pfs15 and Pfs16 and optionally isolate US1508.
